(19) United States
(12) Patent Application Publication
(10) Pub. No.: US 2025/0320502 A1
(43) Pub. Date: Oct. 16, 2025

(54) RNAI CONSTRUCTS FOR INHIBITING PNPLA3 EXPRESSION AND METHODS OF USE THEREOF

(71) Applicant: AMGEN INC., Thousand Oaks, CA (US)

(72) Inventors: Ingrid RULIFSON, Palo Alto, CA (US); Justin K. MURRAY, Moorpark, CA (US); Michael OLLMANN, San Carlos, CA (US); Oliver HOMANN, Berkeley, CA (US)

(73) Assignee: AMGEN INC., Thousand Oaks, CA (US)

(21) Appl. No.: 19/029,290

(22) Filed: Jan. 17, 2025

Related U.S. Application Data
(62) Division of application No. 17/312,721, filed on Jun. 10, 2021.
(60) Provisional application No. 62/777,714, filed on Dec. 10, 2018.

(51) Int. Cl. C12N 15/113

(52) U.S. Cl. CPC C12N 15/1137; C12N 2310/14; C12N 2310/315; C12N 2310/317; C12N 2310/321; C12N 2310/332; C12N 2320/32; C12N 2320/34

(57) ABSTRACT

The present invention relates to RNAi constructs for reducing expression of the PNPLA3 gene. Methods of using such RNAi constructs to treat or prevent liver disease, nonalcoholic fatty liver disease (NAFLD) are also described.

### CROSS-REFERENCE TO RELATED APPLICATIONS

[0001] This application is a divisional of U.S. application Ser. No. 17/312,721, filed on Jun. 10, 2021, which is a national stage application under 35 U.S.C. § 371 of International Application No. PCT/US2019/065481, filed Dec. 10, 2019, which claims the benefit of U.S. Provisional Patent Application No. 62/777,714, filed Dec. 10, 2018, the contents of which are incorporated herein by reference. Each of the foregoing applications is incorporated herein by reference in its entirety.

### FIELD OF THE INVENTION

[0002] The present invention relates to compositions and methods for modulating liver expression of patatin-like phospholipase domain-containing 3 (PNPLA3), In particular, the present invention relates to nucleic acid-based therapeutics for reducing PNPLA3 expression via RNA interference and methods of using such nucleic acid-based therapeutics to treat or prevent liver disease, such as nonalcoholic fatty liver disease (NAFLD).

### INCORPORATION BY REFERENCE OF MATERIAL SUBMITTED ELECTRONICALLY

[0003] Incorporated by reference in its entirety is a computer-readable nucleotide/amino acid sequence listing submitted concurrently herewith and identified as follows: 4.88 megabyte (MB) XML file named “A-2537-US02-DIV_ST26_SQL.xml,” created on Jan. 15, 2025.

### BACKGROUND OF THE INVENTION

[0004] Comprising a spectrum of hepatic pathologies, nonalcoholic fatty liver disease (NAFLD) is the most common chronic liver disease in the world, the prevalence of which doubled in the last 20 years and now is estimated to affect approximately 20% of the world population (Sattar et al. (2014) BMJ 349:g4596; Loomba and Sanyal (2013) Nature Reviews Gastroenterology & hepatology 10(11):686-690; Kim and Kim (2017) Clin Gastroenterol Hepatol 15(4):474-485; Petta et al. (2016) Dig Liver Dis 48(3):333-342). NAFLD begins with the accumulation of triglyceride in the liver and is defined by the presence of cytoplasmic lipid droplets in more than 5% of hepatocytes in an individual 1) without a history of significant alcohol consumption and 2) in which the diagnosis of other types of liver disease have been excluded (Zhu et al (2016) World J Gastroenterol 22(36):8226-33; Rinella (2015) JAMA 313(22):2263-73; Y ki-Jarvinen (2016) Diabetologia 59(6):1104-11). In some individuals the accumulation of ectopic fat in the liver, called steatosis, triggers inflammation and hepatocellular injury leading to a more advanced stage of disease called, nonalcoholic steatohepatitis (NASH) (Rinella, supra). As of 2015, 75-100 million Americans are predicted to have NAFLD; NASH accounting for approximately 10-30% of NAFLD diagnoses (Rinella, supra; Y ounossi et al (2016) Hepatology 64(5):1577-1586).

[0005] Patatin-like phospholipase domain-containing 3 (PNPLA3), formerly known as adiponutrin (ADPN) and calcium-independent phospholipase A 2-epsilon (iPLA (2) c), is a type II transmembrane protein (Wilson et al (2006) J Lipid Res 47(9):1940-9; Jenkins et al (2004) J Biol Chem 279(47):48968-75). Initially identified in adipose cells as a membrane-associated, adipose-enriched protein induced during adipogenesis in mice, it is now well characterized to be expressed in other tissues, including the liver (Wilson et al, supra; Baulande et al (2001) J Biol Chem 276(36):33336-44; Moldes et al. (2006) Eur J Endocrinol 155(3):461-8; Faraj et al. (2006) J Endocrinol 191(2):427-35; Liu et al (2004) J Clin Endocrinol Metab 89(6):2684-9; Lake et al (2005) J Lipid Res 46(11):2477-87). In cell-free biochemical systems, recombinant PNPLA3 protein can exhibit either triacylglycerol lipase or transacylation activity (Jenkins et al., supra; Kumari et al (2012) Cell Metab 15(5):691-702; He et al (2010) J Biol Chem 285(9):6706-15). In hepatocytes, PNPLA3 is expressed on the endoplasmic reticulum and lipid membranes and predominantly exhibits triacylglycerol hydrolase activity (He et al., supra; Huang et al (2010) Proc Natl Acad Sci USA 107(17):7892-7; Ruhanen et al (2014) J Lipid Res 55(4):739-46; Pingitore et al. (2014) Biochim Biophys Acta 1841(4):574-80). Although lacking a secretory signal, data indicates PNPLA3 is secreted and can be found in human plasma as disulfide-bond dependent multimers (Winberg et al. (2014) Biochem Biophys Res Commun 446(4):1114-9). Accordingly, novel therapeutics targeting PNPLA3 function represents a novel approach to reducing PNPLA3 levels and treating hepatologic diseases, such as nonalcoholic fatty liver disease.

### SUMMARY OF THE INVENTION

[0006] The present invention is based, in part, on the design and generation of RNAi constructs that target the PNPLA3 gene and reduce expression of PNPLA3 in liver cells. The sequence specific inhibition of PNPLA3 expression is useful for treating or preventing conditions associated with PNPLA3 expression, such as liver-related diseases, such as, for example, simple fatty liver (steatosis), nonalcoholic steatohepatitis (NASH), cirrhosis (irreversible, advanced scarring of the liver), or PNPLA3 related obesity. Accordingly, in one embodiment, the present invention provides an RNAi construct comprising a sense strand and an antisense strand, wherein the antisense strand comprises a region having a sequence that is complementary to a PNPLA3 mRNA sequence. In certain embodiments, the antisense strand comprises a region having at least 15 contiguous nucleotides from an antisense sequence listed in Table 1 or Table 2. In some embodiments, the RNAi of the present invention selectively inhibits PNPLA3-rs738409, PNPLA3-rs738408, and/or PNPLA3-rs738409-rs738408 minor alleles over the reference allele which does not contain these changes.

[0007] In some embodiments, the sense strand of the RNAi constructs described herein comprises a sequence that is sufficiently complementary to the sequence of the antisense strand to form a duplex region of about 15 to about 30 base pairs in length. In these and other embodiments, the sense and antisense strands each are about 15 to about 30 nucleotides in length. In some embodiments, the RNAi constructs comprise at least one blunt end. In other embodiments, the RNAi constructs comprise at least one nucleotide overhang. Such nucleotide overhangs may comprise at least 1 to 6 unpaired nucleotides and can be located at the 3′ end of the sense strand, the 3′ end of the antisense strand, or the 3′ end of both the sense and antisense strand. In certain embodiments, the RNAi constructs comprise an overhang of two unpaired nucleotides at the 3′ end of the sense strand and the 3′ end of the antisense strand. In other embodiments, the RNAi constructs comprise an overhang of two unpaired nucleotides at the 3′ end of the antisense strand and a blunt end of the 3′ end of the sense strand/5′ end of the antisense strand.

[0008] The RNAi constructs of the invention may comprise one or more modified nucleotides, including nucleotides having modifications to the ribose ring, nucleobase, or phosphodiester backbone. In some embodiments, the RNAi constructs comprise one or more 2′-modified nucleotides. Such 2′-modified nucleotides can include 2′-fluoro modified nucleotides, 2′-O-methyl modified nucleotides, 2′-O-methoxyethyl modified nucleotides, 2′-O-allyl modified nucleotides, bicyclic nucleic acids (BNA), glycol nucleic acids (GNAs), inverted bases (e.g. inverted adenosine) or combinations thereof. In one particular embodiment, the RNAi constructs comprise one or more 2′-fluoro modified nucleotides, 2′-O-methyl modified nucleotides, or combinations thereof. In some embodiments, all of the nucleotides in the sense and antisense strand of the RNAi construct are modified nucleotides.

[0009] In some embodiments, the RNAi constructs comprise at least one backbone modification, such as a modified internucleotide or internucleoside linkage. In certain embodiments, the RNAi constructs described herein comprise at least one phosphorothioate internucleotide linkage. In particular embodiments, the phosphorothioate internucleotide linkages may be positioned at the 3′ or 5′ ends of the sense and/or antisense strands.

[0010] In some embodiments, the antisense strand and/or the sense strand of the RNAi constructs of the invention may comprise or consist of a sequence from the antisense and sense sequences listed in Tables 1 or 2. In certain embodiments, the RNAi construct may be any one of the duplex compounds listed in any one of Tables 1 to 2.

### BRIEF DESCRIPTION OF THE FIGURES

[0011] FIGS. 1A-D show screening of five siRNA molecules for both dose-dependent mRNA knockdown and functional durability in vivo.

[0012] FIGS. 2A-G shows effect of PNPLA3 siRNA molecules in vivo in mice, liver weight, confirmation of human PNPLA3 expression, hepatic triglyceride content, serum TIMP1 levels, and histological indication of steatosis or inflammation.

[0013] FIGS. 3A-G shows effect of PNPLA3 siRNA molecules in vivo, liver weight, confirmation of human PNPLA3 expression, hepatic triglyceride content, serum TIMP1 levels, and histological indication of steatosis or inflammation.

[0014] FIGS. 4A-D shows the ability of a PNPLA3^{rs738409-rs738408}-specific siRNA molecule to rescue disease-associated phenotypes due to overexpression of PNPLA3^{rs738409-rs738408}, hepatic triglyceride content, serum TIMP1 levels, and histological indication of steatosis or inflammation.

[0015] FIGS. 5A-L shows the ability of a PNPLA3^{rs738409-rs738408} specific siRNA molecule to prevent the development of early fibrosis.

[0016] FIG. 6 shows the full sequence of the AAV plasmid (SEQ ID NO: 3345) containing the PNPLA3 minor allele target sequences. The portion containing the murine CMV promoter, Firefly luciferase reporter and target sequences is underlined.

[0017] FIG. 7 shows the full sequence of the AAV plasmid (SEQ ID NO: 3346) containing the PNPLA3 reference allele target sequences. The portion containing the murine CM V promoter, Firefly luciferase reporter and target sequences is underlined.

[0018] FIG. 8 shows example images of a mouse injected with AAV expressing human PNPLA3 minor allele target sequences (top row), versus a mouse injected with AAV expressing human PNPLA3 reference allele target sequences (bottom row). After acquiring baseline images (first column), the same siRNA molecule was injected into both mice (D-2878 at 3 mpk). Columns 2 through 5 are images captured at weeks 1, 2, 3, and 4, respectively. Images have been converted to greyscale using Living Image® software. Lighter regions are areas of low total flux [p/s], versus darker regions of high flux [p/s]. The relative percent knockdown of siRNA-treated mice at each weekly time point, normalized to vehicle-treated mice, is displayed in the inset (rows 2 and 4).

[0019] FIGS. 9A-9F show an example of siRNA molecule, D-2419, demonstrating both dose-dependent and allele-selective mRNA knockdown and functional efficacy in vivo. FIG. 9A: siRNA molecule, D-2419, was injected at 3.0 and 10.0 milligrams per kilogram of body weight subcutaneously into the abdomen of the mouse. FIG. 9B: The data represents the average relative percent mRNA knockdown, and standard error of the mean, of the human PNPLA3^{rs738409-rs738408} allele verses PNPLA3^{WT} set to the vehicle-treated control group. FIG. 9C: Livers from the two-week treatment group were processed for triglyceride content to evaluate functional efficacy. FIG. 9D: To control for efficient GalNAc-mediated delivery of siRNA, D-2787, a siRNA cross-reactive for human and mouse HPRT and Hprt, respectively, was delivered at 10 milligrams per kilogram and the livers harvested after two weeks. The data represents the copies of HPRT mRNA and Hprt mRNA in D-2787-treated (N=4) versus vehicle-treated (N=5) mice. FIG. 9E: The data represents the average relative percent mRNA knockdown, and standard error of the mean, of human HPRT and mouse Hprt mRNA, respectively, set to the vehicle-treated control group; all normalized to human TBP. FIG. 9F: To confirm expression of GalNAc receptor on the hepatocytes of PXB Mice®, mouse Asgr1 mRNA and human ASGR1 mRNA levels were evaluated in the absence and presence of D-2419.

### DETAILED DESCRIPTION OF THE INVENTION

[0020] The present invention is directed to compositions and methods for regulating the expression of the Patatin-Like Phospholipase Domain Containing 3 (PNPLA3) gene. In some embodiments, the gene may be within a cell or subject, such as a mammal (e.g. a human). In some embodiments, compositions of the invention comprise RNAi constructs that target a PNPLA3 mRNA and reduce PNPLA3 expression in a cell or mammal. Such RNAi constructs are useful for treating or preventing various forms of liver-related diseases, such as, for example, simple fatty liver (steatosis), nonalcoholic steatohepatitis (NASH), cirrhosis (irreversible, advanced scarring of the liver), or PNPLA3 related obesity.

[0021] In 2008, a genome wide association study (GWAS) exploring nonsynomonous sequence variations, or single nucleotide polymorphisms (SNPs), associated with NAFLD identified a variant in PNPLA3, (rs738409[G], encoding I148M; which can be referred to as PNPLA3-rs738409, PNPLA3-ma or PNPLA3-minor allele), as significantly associated with hepatic fat content. Since this initial report, subsequent GWAS confirm PNPLA3 rs738409 as the major genetic determinant of NAFLD, significantly associated with 1) increased levels of the serum biomarker for liver damage, alanine transaminase (ALT), 2) NAFLD incidence, progression and severity, 3) both obese and lean individuals, and 4) the only known SNP shown to be significantly associated with all stages of NAFLD: steatosis, NASH, cirrhosis and hepatic cell carcinoma. The consensus among numerous G WAS indicate the association of PNPLA3 rs738409 with NAFLD is independent of age, gender, ethnicity, metabolic syndrome, body mass index, insulin resistance, and serum lipids. Furthermore, statistical analyses from multiple sources estimate approximately 50% of NAFLD patients carry the PNPLA3 rs738409 mutation. Patients can be homozygous or heterozygous for the PNPLA3 rs738409 mutation. Additionally, it has been discovered that patients having the PNPLA3 rs738409 mutation often also carry an rs738408 mutation 3 base pairs away (Tian et al (2010) Nature Genetics 42:21-23). Thus, a patient can have a PNPLA3-rs738409 minor allele, PNPLA3-rs738408 minor allele or PNPLA3-rs738409-rs738408 double minor allele mutation (PNPLA3-dma).

[0022] Investigators have developed mouse models for exploring PNPLA3 function in vivo. To date, no detectable metabolic phenotype has been identified as the result of Pnpla3-deficiency or Pnpla3 over-expression. In contrast, expression of Pnpla3^{I148M} in both transgenic mice and knock-in mice, led to increased hepatic triglyceride levels akin to NAFLD Thus, combined, the in vivo mouse model data points to expression of the mutant Pnpla3^{I148M} protein, and not over-expression of the wild type protein, as the driver of the disease phenotype. These findings, in addition to the high frequency of the minor allele in NAFLD-affected individuals and prevailing association with the disease, underline PNPLA3 rs738409 as a prime therapeutic target for NAFLD.

[0023] RNA interference (RNAi) is the process of introducing exogeneous RNA into a cell leading to specific degradation of the mRNA encoding the targeted protein with a resultant decrease in protein expression. Advances in both the RNAi technology and hepatic delivery and growing positive outcomes with other RNAi-based therapies, suggest RNAi as a compelling means to therapeutically treat NAFLD by directly targeting PNPLA3I148M. Numerous GWAS indicate a dose-dependent effect of PNPLA3 rs738409 on NAFLD incidence, progression and severity (GWAS); the odds ratio tending to be double, if not more, for homozygote carriers versus heterozygote carriers, yet still at least two-fold more for heterozygotes versus wild type individuals. Thus, silencing PNPLA3 employing allelic discrimination specificity could be both a potential means to reduce hepatic triglyceride in PNPLA3I148M carriers, but also present a scenario in which heterozygotes may gain benefit without silencing of the wild type allele. A long these lines, we identified SNP-specific short interfering RNAs (siRNA) to PNPLA3I148M and demonstrate proof of concept in vitro. Using both hepatoma cell lines, Hep3B (homozygous for the reference allele, PNPLA3I148I) and HEPG2 (homozygous for the minor allele, PNPLA3I148M), we identified siRNA sequences capable of inhibiting specifically PNPLA3I148M gene expression. The inhibitory effect of these sequences were confirmed by screening on Chinese hamster ovary (CHO) cells over-expressing either PNPLA3I148I or PNPLA3I148M. Using adeno-associated virus (AAV) to overexpress human PNPLA3I148M in vivo, we then demonstrated treatment with minor allele-specific SNPs not only specifically reduced human PNPLA3I148M expression in mice, but also significantly reversed hepatic triglyceride accumulation induced by over-expression of human PNPLA3I148M.

[0024] As used herein, the term “RNAi construct” refers to an agent comprising a RNA molecule that is capable of downregulating expression of a target gene (e.g. PNPLA3) via a RNA interference mechanism when introduced into a cell. RNA interference is the process by which a nucleic acid molecule induces the cleavage and degradation of a target RNA molecule (e.g. messenger RNA or mRNA molecule) in a sequence-specific manner, e.g. through a RNA induced silencing complex (RISC) pathway. In some embodiments, the RNAi construct comprises a double-stranded RNA molecule comprising two antiparallel strands of contiguous nucleotides that are sufficiently complementary to each other to hybridize to form a duplex region. “Hybridize” or “hybridization” refers to the pairing of complementary polynucleotides, typically via hydrogen bonding (e.g. Watson-Crick, Hoogsteen or reversed Hoogsteen hydrogen bonding) between complementary bases in the two polynucleotides. The strand comprising a region having a sequence that is substantially complementary to a target sequence (e.g. target mRNA) is referred to as the “antisense strand.” The “sense strand” refers to the strand that includes a region that is substantially complementary to a region of the antisense strand. In some embodiments, the sense strand may comprise a region that has a sequence that is substantially identical to the target sequence.

[0025] In some embodiments, the invention is an RNAi directed to PNPLA3. In some embodiments, the invention is an RNAi that binds at the PNPLA3 rs738409 site. In some embodiments, the invention is an RNAi that binds at the PNPLA3 rs738408 site. In some embodiments, the invention is an RNAi that binds at both the PNPLA3 rs738409 rs738408 sites. In some embodiments, the invention is an RNAi that preferentially binds PNPLA3 rs738409 over the native PNPLA3 sequence (PNPLA3-ref). In some embodiments, the invention is an RNAi that preferentially binds PNPLA3 rs738408 over the PNPLA3-ref sequence. In some embodiments, the invention is an RNAi that preferentially binds PNPLA3-dma over PNPLA3-ma. In some embodiments, the invention in an RNAi molecule that contains any of the sequences found in Table 1 or 2.

[0026] A double-stranded RNA molecule may include chemical modifications to ribonucleotides, including modifications to the ribose sugar, base, or backbone components of the ribonucleotides, such as those described herein or known in the art. Any such modifications, as used in a double-stranded RNA molecule (e.g. siRNA, shRNA, or the like), are encompassed by the term “double-stranded RNA” for the purposes of this disclosure.

[0027] As used herein, a first sequence is “complementary” to a second sequence if a polynucleotide comprising the first sequence can hybridize to a polynucleotide comprising the second sequence to form a duplex region under certain conditions, such as physiological conditions. Other such conditions can include moderate or stringent hybridization conditions, which are known to those of skill in the art. A first sequence is considered to be fully complementary (100% complementary) to a second sequence if a polynucleotide comprising the first sequence base pairs with a polynucleotide comprising the second sequence over the entire length of one or both nucleotide sequences without any mismatches. A sequence is “substantially complementary” to a target sequence if the sequence is at least about 80%, 85%, 90%, 95%, 96%, 97%, 98%, 99% or 100% complementary to a target sequence. Percent complementarity can be calculated by dividing the number of bases in a first sequence that are complementary to bases at corresponding positions in a second or target sequence by the total length of the first sequence. A sequence may also be said to be substantially complementary to another sequence if there are no more than 5, 4, 3, 2, or 1 mismatches over a 30 base pair duplex region when the two sequences are hybridized. Generally, if any nucleotide overhangs, as defined herein, are present, the sequence of such overhangs is not considered in determining the degree of complementarity between two sequences. By way of example, a sense strand of 21 nucleotides in length and an antisense strand of 21 nucleotides in length that hybridize to form a 19 base pair duplex region with a 2 nucleotide overhang at the 3′ end of each strand would be considered to be fully complementary as the term is used herein.

[0028] In some embodiments, a region of the antisense strand comprises a sequence that is fully complementary to a region of the target RNA sequence (e.g. PNPLA3 mRNA). In such embodiments, the sense strand may comprise a sequence that is fully complementary to the sequence of the antisense strand. In other such embodiments, the sense strand may comprise a sequence that is substantially complementary to the sequence of the antisense strand, e.g. having 1, 2, 3, 4, or 5 mismatches in the duplex region formed by the sense and antisense strands. In certain embodiments, it is preferred that any mismatches occur within the terminal regions (e.g. within 6, 5, 4, 3, 2, or 1 nucleotides of the 5′ and/or 3′ ends of the strands). In one embodiment, any mismatches in the duplex region formed from the sense and antisense strands occur within 6, 5, 4, 3, 2, or 1 nucleotides of the 5′ end of the antisense strand.

[0029] In certain embodiments, the sense strand and antisense strand of the double-stranded RNA may be two separate molecules that hybridize to form a duplex region, but are otherwise unconnected. Such double-stranded RNA molecules formed from two separate strands are referred to as “small interfering RNAs” or “short interfering RNAs” (siRNAs). Thus, in some embodiments, the RNAi constructs of the invention comprise a siRNA.

[0030] Where the two substantially complementary strands of a dsRNA are comprised by separate RNA molecules, those molecules need not, but can be covalently connected. Where the two strands are connected covalently by means other than an uninterrupted chain of nucleotides between the 3′-end of one strand and the 5′-end of the respective other strand forming the duplex structure, the connecting structure is referred to as a “linker.” The RNA strands may have the same or a different number of nucleotides. The maximum number of base pairs in the duplex is the number of nucleotides in the shortest strand of the dsRNA minus any overhangs that are present in the duplex. In addition to the duplex structure, an RNAi may comprise one or more nucleotide overhangs.

[0031] In other embodiments, the sense strand and the antisense strand that hybridize to form a duplex region may be part of a single RNA molecule, i.e. the sense and antisense strands are part of a self-complementary region of a single RNA molecule. In such cases, a single RNA molecule comprises a duplex region (also referred to as a stem region) and a loop region. The 3′ end of the sense strand is connected to the 5′ end of the antisense strand by a contiguous sequence of unpaired nucleotides, which will form the loop region. The loop region is typically of a sufficient length to allow the RNA molecule to fold back on itself such that the antisense strand can base pair with the sense strand to form the duplex or stem region. The loop region can comprise from about 3 to about 25, from about 5 to about 15, or from about 8 to about 12 unpaired nucleotides. Such RNA molecules with at least partially self-complementary regions are referred to as “short hairpin RNAs” (shRNAs). In some embodiments, the loop region can comprise at least 1, 2, 3, 4, 5, 10, 20, or 25 unpaired nucleotides. In some embodiments, the loop region can have 10, 9, 8, 7, 6, 5, 4, 3, 2, or fewer unpaired nucleotides. In certain embodiments, the RNAi constructs of the invention comprise a shRNA. The length of a single, at least partially self-complementary RNA molecule can be from about 35 nucleotides to about 100 nucleotides, from about 45 nucleotides to about 85 nucleotides, or from about 50 to about 60 nucleotides and comprise a duplex region and loop region each having the lengths recited herein.

[0032] In some embodiments, the RNAi constructs of the invention comprise a sense strand and an antisense strand, wherein the antisense strand comprises a region having a sequence that is substantially or fully complementary to a PNPLA3 messenger RNA (mRNA) sequence. As used herein, a “PNPLA3 mRNA sequence” refers to any messenger RNA sequence, including splice variants, encoding a PNPLA3 protein, including PNPLA3 protein variants or isoforms from any species (e.g. mouse, rat, non-human primate, human). PNPLA3 protein is also known as adiponutrin (ADPN) and calcium-independent phospholipase A 2-epsilon (iPLA (2)□)).

[0033] A PNPLA3 mRNA sequence also includes the transcript sequence expressed as its complementary DNA (cDNA) sequence. A cDNA sequence refers to the sequence of an mRNA transcript expressed as DNA bases (e.g. guanine, adenine, thymine, and cytosine) rather than RNA bases (e.g. guanine, adenine, uracil, and cytosine). Thus, the antisense strand of the RNAi constructs of the invention may comprise a region having a sequence that is substantially or fully complementary to a target PNPLA3 mRNA sequence or PNPLA3 cDNA sequence. A PNPLA3 mRNA or cDNA sequence can include, but is not limited to, any PNPLA3 mRNA or cDNA sequence such as can be derived from the NCBI Reference sequence NM_025225.2.

[0034] A region of the antisense strand can be substantially complementary or fully complementary to at least 15 consecutive nucleotides of the PNPLA3 mRNA sequence. In some embodiments, the target region of the PNPLA3 mRNA sequence to which the antisense strand comprises a region of complementarity can range from about 15 to about 30 consecutive nucleotides, from about 16 to about 28 consecutive nucleotides, from about 18 to about 26 consecutive nucleotides, from about 17 to about 24 consecutive nucleotides, from about 19 to about 25 consecutive nucleotides, from about 19 to about 23 consecutive nucleotides, or from about 19 to about 21 consecutive nucleotides. In certain embodiments, the region of the antisense strand comprising a sequence that is substantially or fully complementary to a PNPLA3 mRNA sequence may, in some embodiments, comprise at least 15 contiguous nucleotides from an antisense sequence listed in Table 1 or Table 2. In other embodiments, the antisense sequence comprises at least 16, at least 17, at least 18, or at least 19 contiguous nucleotides from an antisense sequence listed in Table 1 or Table 2. In some embodiments, the sense and/or antisense sequence comprises at least 15 nucleotides from a sequence listed in Table 1 or 2 with no more than 1, 2, or 3 nucleotide mismatches.

[0035] The sense strand of the RNAi construct typically comprises a sequence that is sufficiently complementary to the sequence of the antisense strand such that the two strands hybridize under physiological conditions to form a duplex region. A “duplex region” refers to the region in two complementary or substantially complementary polynucleotides that form base pairs with one another, either by Watson-Crick base pairing or other hydrogen bonding interaction, to create a duplex between the two polynucleotides. The duplex region of the RNAi construct should be of sufficient length to allow the RNAi construct to enter the RNA interference pathway, e.g. by engaging the Dicer enzyme and/or the RISC complex. For instance, in some embodiments, the duplex region is about 15 to about 30 base pairs in length. Other lengths for the duplex region within this range are also suitable, such as about 15 to about 28 base pairs, about 15 to about 26 base pairs, about 15 to about 24 base pairs, about 15 to about 22 base pairs, about 17 to about 28 base pairs, about 17 to about 26 base pairs, about 17 to about 24 base pairs, about 17 to about 23 base pairs, about 17 to about 21 base pairs, about 19 to about 25 base pairs, about 19 to about 23 base pairs, or about 19 to about 21 base pairs. In one embodiment, the duplex region is about 17 to about 24 base pairs in length. In another embodiment, the duplex region is about 19 to about 21 base pairs in length.

[0036] In some embodiments, an RNAi agent of the invention contains a duplex region of about 24 to about 30 nucleotides that interacts with a target RNA sequence, e.g., an PNPLA3 target mRNA sequence, to direct the cleavage of the target RNA. Without wishing to be bound by theory, long double stranded RNA introduced into cells can be broken down into siRNA by a Type III endonuclease known as Dicer (Sharp et al. (2001) Genes Dev. 15:485). Dicer, a ribonuclease-III-like enzyme, 15 processes the dsRNA into 19-23 base pair short interfering RNAs with characteristic two base 3′ overhangs (Bernstein, et al., (2001) Nature 409:363). The siRNAs are then incorporated into an RNA-induced silencing complex (RISC) where one or more helicases unwind the siRNA duplex, enabling the complementary antisense strand to guide target recognition (Nykanen, et al., (2001) Cell107:309). Upon binding to the appropriate target 20 mRNA, one or more endonucleases within the RISC cleave the target to induce silencing (Elbashir, et al., (2001) Genes Dev. 15:188).

[0037] For embodiments in which the sense strand and antisense strand are two separate molecules (e.g. RNAi construct comprises a siRNA), the sense strand and antisense strand need not be the same length as the length of the duplex region. For instance, one or both strands maybe longer than the duplex region and have one or more unpaired nucleotides or mismatches flanking the duplex region. Thus, in some embodiments, the RNAi construct comprises at least one nucleotide overhang. As used herein, a “nucleotide overhang” refers to the unpaired nucleotide or nucleotides that extend beyond the duplex region at the terminal ends of the strands. Nucleotide overhangs are typically created when the 3′ end of one strand extends beyond the 5′ end of the other strand or when the 5′ end of one strand extends beyond the 3′ end of the other strand. The length of a nucleotide overhang is generally between 1 and 6 nucleotides, land 5 nucleotides, 1 and 4 nucleotides, 1 and 3 nucleotides, 2 and 6 nucleotides, 2 and 5 nucleotides, or 2 and 4 nucleotides. In some embodiments, the nucleotide overhang comprises 1, 2, 3, 4, 5, or 6 nucleotides. In one particular embodiment, the nucleotide overhang comprises 1 to 4 nucleotides. In certain embodiments, the nucleotide overhang comprises 2 nucleotides. The nucleotides in the overhang can be ribonucleotides, deoxyribonucleotides, or modified nucleotides as described herein. In some embodiments, the overhang comprises a 5′-uridineuridine-3′ (5′-UU-3′) dinucleotide. In such embodiments, the UU dinucleotide may comprise ribonucleotides or modified nucleotides, e.g. 2′-modified nucleotides. In other embodiments, the overhang comprises a 5′-deoxythymidine-deoxythymidine-3′ (5′-dT dT-3′) dinucleotide.

[0038] The nucleotide overhang can be at the 5′ end or 3′ end of one or both strands. For example, in one embodiment, the RNAi construct comprises a nucleotide overhang at the 5′ end and the 3′ end of the antisense strand. In another embodiment, the RNAi construct comprises a nucleotide overhang at the 5′ end and the 3′ end of the sense strand. In some embodiments, the RNAi construct comprises a nucleotide overhang at the 5′ end of the sense strand and the 5′ end of the antisense strand. In other embodiments, the RNAi construct comprises a nucleotide overhang at the 3′ end of the sense strand and the 3′ end of the antisense strand.

[0039] The RNAi constructs may comprise a single nucleotide overhang at one end of the double-stranded RNA molecule and a blunt end at the other. A “blunt end” means that the sense strand and antisense strand are fully base-paired at the end of the molecule and there are no unpaired nucleotides that extend beyond the duplex region. In some embodiments, the RNAi construct comprises a nucleotide overhang at the 3′ end of the sense strand and a blunt end at the 5′ end of the sense strand and 3′ end of the antisense strand. In other embodiments, the RNAi construct comprises a nucleotide overhang at the 3′ end of the antisense strand and a blunt end at the 5′ end of the antisense strand and the 3′ end of the sense strand. In certain embodiments, the RNAi construct comprises a blunt end at both ends of the double-stranded RNA molecule. In such embodiments, the sense strand and antisense strand have the same length and the duplex region is the same length as the sense and antisense strands (i.e. the molecule is double-stranded over its entire length).

[0040] The sense strand and antisense strand can each independently be about 15 to about 30 nucleotides in length, about 18 to about 28 nucleotides in length, about 19 to about 27 nucleotides in length, about 19 to about 25 nucleotides in length, about 19 to about 23 nucleotides in length, about 21 to about 25 nucleotides in length, or about 21 to about 23 nucleotides in length. In certain embodiments, the sense strand and antisense strand are each about 18, about 19, about 20, about 21, about 22, about 23, about 24, or about 25 nucleotides in length. In some embodiments, the sense strand and antisense strand have the same length but form a duplex region that is shorter than the strands such that the RNAi construct has two nucleotide overhangs. For instance, in one embodiment, the RNAi construct comprises (i) a sense strand and an antisense strand that are each 21 nucleotides in length, (ii) a duplex region that is 19 base pairs in length, and (iii) nucleotide overhangs of 2 unpaired nucleotides at both the 3′ end of the sense strand and the 3′ end of the antisense strand. In another embodiment, the RNAi construct comprises (i) a sense strand and an antisense strand that are each 23 nucleotides in length, (ii) a duplex region that is 21 base pairs in length, and (iii) nucleotide overhangs of 2 unpaired nucleotides at both the 3′ end of the sense strand and the 3′ end of the antisense strand. In other embodiments, the sense strand and antisense strand have the same length and form a duplex region over their entire length such that there are no nucleotide overhangs on either end of the double-stranded molecule. In one such embodiment, the RNAi construct is blunt ended and comprises (i) a sense strand and an antisense strand, each of which is 21 nucleotides in length, and (ii) a duplex region that is 21 base pairs in length. In another such embodiment, the RNAi construct is blunt ended and comprises (i) a sense strand and an antisense strand, each of which is 23 nucleotides in length, and (ii) a duplex region that is 23 base pairs in length.

[0041] In other embodiments, the sense strand or the antisense strand is longer than the other strand and the two strands form a duplex region having a length equal to that of the shorter strand such that the RNAi construct comprises at least one nucleotide overhang. For example, in one embodiment, the RNAi construct comprises (i) a sense strand that is 19 nucleotides in length, (ii) an antisense strand that is 21 nucleotides in length, (iii) a duplex region of 19 base pairs in length, and (iv) a single nucleotide overhang of 2 unpaired nucleotides at the 3′ end of the antisense strand. In another embodiment, the RNAi construct comprises (i) a sense strand that is 21 nucleotides in length, (ii) an antisense strand that is 23 nucleotides in length, (iii) a duplex region of 21 base pairs in length, and (iv) a single nucleotide overhang of 2 unpaired nucleotides at the 3′ end of the antisense strand.

[0042] The antisense strand of the RNAi constructs of the invention can comprise the sequence of any one of the antisense sequences listed in Table 1 or Table 2 or the sequence of nucleotides 1-19 of any of these antisense sequences. Each of the antisense sequences listed in Tables 1 and 6 comprises a sequence of 19 consecutive nucleotides (first 19 nucleotides counting from the 5′ end) that is complementary to a PNPLA3 mRNA sequence plus a two nucleotide overhang sequence. Thus, in some embodiments, the antisense strand comprises a sequence of nucleotides 1-19 of any one of SEQ ID NOs: 1-166 or 167-332.

### Modified Nucleotides

[0043] The RNAi constructs of the invention may comprise one or more modified nucleotides. A “modified nucleotide” refers to a nucleotide that has one or more chemical modifications to the nucleoside, nucleobase, pentose ring, or phosphate group. As used herein, modified nucleotides do not encompass ribonucleotides containing adenosine monophosphate, guanosine monophosphate, uridine monophosphate, and cytidine monophosphate, and deoxyribonucleotides containing deoxyadenosine monophosphate, deoxyguanosine monophosphate, deoxythymidine monophosphate, and deoxycytidine monophosphate. However, the RNAi constructs may comprise combinations of modified nucleotides, ribonucleotides, and deoxyribonucleotides. Incorporation of modified nucleotides into one or both strands of double-stranded RNA molecules can improve the in vivo stability of the RNA molecules, e.g., by reducing the molecules' susceptibility to nucleases and other degradation processes. The potency of RNAi constructs for reducing expression of the target gene can also be enhanced by incorporation of modified nucleotides.

[0044] In certain embodiments, the modified nucleotides have a modification of the ribose sugar. These sugar modifications can include modifications at the 2′ and/or 5′ position of the pentose ring as well as bicyclic sugar modifications. A 2′-modified nucleotide refers to a nucleotide having a pentose ring with a substituent at the 2′ position other than H or OH. Such 2′ modifications include, but are not limited to, 2′-O-alkyl (e.g. O—C1-C10 or O—C1-C10 substituted alkyl), 2′-O-allyl (O—CH2CH═CH2), 2′-C-allyl, 2′-fluoro, 2′-O-methyl (OCH3), 2′-O-methoxyethyl (O—(CH2)2OCH3), 2′-OCF3, 2′-O(CH2)2SCH3, 2′-O-aminoalkyl, 2′-amino (e.g.NH2), 2′-O-ethylamine, and 2′-azido. Modifications at the 5′ position of the pentose ring include, but are not limited to, 5′-methyl (R or S); 5′-vinyl, and 5′-methoxy.

[0045] A “bicyclic sugar modification” refers to a modification of the pentose ring where a bridge connects two atoms of the ring to form a second ring resulting in a bicyclic sugar structure. In some embodiments the bicyclic sugar modification comprises a bridge between the 4′ and 2′ carbons of the pentose ring. Nucleotides comprising a sugar moiety with a bicyclic sugar modification are referred to herein as bicyclic nucleic acids or BNAs. Exemplary bicyclic sugar modifications include, but are not limited to, □-L-Methyleneoxy (4′-CH2-O-2′) bicyclicnucleic acid (BNA); □-D-M ethyleneoxy (4′-CH2-O-2′) BNA (also referred to as a locked nucleic acid or LNA); Ethyleneoxy (4′-(CH2) 2-O-2′) BNA; Aminooxy (4′-CH2-O—N(R)-2′) BNA; Oxyamino (4′-CH2-N(R)—O-2′) BNA; Methyl(methyleneoxy) (4′-CH(CH3)-O-2′) BNA (also referred to as constrained ethyl or cEt); methylene-thio (4′-CH2-S-2′) BNA; methylene-amino (4′-CH2-N(R)-2′) BNA; methyl carbocyclic (4′-CH2-CH(CH3)-2′) BNA; propylene carbocyclic (4′-(CH2) 3-2′) BNA; and Methoxy (ethyleneoxy) (4′-CH(CH2OMe)-O-2′) BNA (also referred to as constrained MOE or cMOE). These and other sugar-modified nucleotides that can be incorporated into the RNAi constructs of the invention are described in U.S. Pat. No. 9,181,551, U.S. Patent Publication No. 2016/0122761, and Deleavey and Damha, Chemistry and Biology, Vol. 19:937-954, 2012, all of which are hereby incorporated by reference in their entireties.

[0046] In some embodiments, the RNAi constructs comprise one or more 2′-fluoro modified nucleotides, 2′-O-methyl modified nucleotides, 2′-O-methoxyethyl modified nucleotides, 2′-O-allyl modified nucleotides, bicyclic nucleic acids (BNAs), or combinations thereof. In certain embodiments, the RNAi constructs comprise one or more 2′-fluoro modified nucleotides, 2′-O-methyl modified nucleotides, 2′-O-methoxyethyl modified nucleotides, or combinations thereof. In one particular embodiment, the RNAi constructs comprise one or more 2′-fluoro modified nucleotides, 2′-O-methyl modified nucleotides or combinations thereof.

[0047] Both the sense and antisense strands of the RNAi constructs can comprise one or multiple modified nucleotides. For instance, in some embodiments, the sense strand comprises 1, 2, 3, 4, 5, 6, 7, 8, 9, 10 or more modified nucleotides. In certain embodiments, all nucleotides in the sense strand are modified nucleotides. In some embodiments, the antisense strand comprises 1, 2, 3, 4, 5, 6, 7, 8, 9, 10 or more modified nucleotides. In other embodiments, all nucleotides in the antisense strand are modified nucleotides. In certain other embodiments, all nucleotides in the sense strand and all nucleotides in the antisense strand are modified nucleotides. In these and other embodiments, the modified nucleotides can be 2′-fluoro modified nucleotides, 2′-O-methyl modified nucleotides, or combinations thereof.

[0048] In some embodiments, all pyrimidine nucleotides preceding an adenosine nucleotide in the sense strand, antisense strand, or both strands are modified nucleotides. For example, where the sequence 5′-CA-3′ or 5′-UA-3′ appears in either strand, the cytidine and uridine nucleotides are modified nucleotides, preferably 2′-O-methyl modified nucleotides. In certain embodiments, all pyrimidine nucleotides in the sense strand are modified nucleotides (e.g. 2′-O-methyl modified nucleotides), and the 5′ nucleotide in all occurrences of the sequence 5′-CA-3′ or 5′-UA-3′ in the antisense strand are modified nucleotides (e.g. 2′-O-methyl modified nucleotides). In other embodiments, all nucleotides in the duplex region are modified nucleotides. In such embodiments, the modified nucleotides are preferably 2′-O-methyl modified nucleotides, 2′-fluoro modified nucleotides or combinations thereof.

[0049] In embodiments in which the RNAi construct comprises a nucleotide overhang, the nucleotides in the overhang can be ribonucleotides, deoxyribonucleotides, or modified nucleotides. In one embodiment, the nucleotides in the overhang are deoxyribonucleotides, e.g., deoxythymidine. In another embodiment, the nucleotides in the overhang are modified nucleotides. For instance, in some embodiments, the nucleotides in the overhang are 2′-O-methyl modified nucleotides, 2′-fluoro modified nucleotides, 2′-methoxyethyl modified nucleotides, or combinations thereof.

[0050] The RNAi constructs of the invention may also comprise one or more modified internucleotide linkages. As used herein, the term “modified internucleotide linkage” refers to an internucleotide linkage other than the natural 3′ to 5′ phosphodiester linkage. In some embodiments, the modified internucleotide linkage is a phosphorous-containing internucleotide linkage, such as a phosphotriester, aminoalkyl phosphotriester, an alkylphosphonate (e.g. methylphosphonate, 3′-alkylene phosphonate), a phosphinate, a phosphoramidate (e.g. 3′-aminophosphoramidate and aminoalkylphosphoramidate), a phosphorothioate (P═S), a chiralphosphorothioate, a phosphorodithioate, a thionophosphoramidate, a thionoalkylphosphonate, athionoalkylphosphotriester, and a boranophosphate. In one embodiment, a modified internucleotide linkage is a 2′ to 5′ phosphodiester linkage. In other embodiments, the modified internucleotide linkage is a non-phosphorous-containing internucleotide linkage and thus can be referred to as a modified internucleoside linkage. Such non-phosphorous-containing linkages include, but are not limited to, morpholino linkages (formed in part from the sugar portion of a nucleoside); siloxane linkages (—O—Si(H)2-O—); sulfide, sulfoxide and sulfone linkages; formacetyl and thioformacetyl linkages; alkene containing backbones; sulfamate backbones; methylenemethylimino (—CH2-N(CH3)-O—CH2-) and methylenehydrazino linkages; sulfonate and sulfonamide linkages; amide linkages; and others having mixed N, O, S and CH2 component parts. In one embodiment, the modified internucleoside linkage is a peptide-based linkage (e.g. aminoethylglycine) to create a peptide nucleic acid or PNA, such as those described in U.S. Pat. Nos. 5,539,082; 5,714,331; and 5,719,262. Other suitable modified internucleotide and internucleoside linkages that may be employed in the RNAi constructs of the invention are described in U.S. Pat. Nos. 6,693,187, 9,181,551, U.S. Patent Publication No. 2016/0122761, and Deleavey and Damha, Chemistry and Biology, Vol. 19: 937-954, 2012, all of which are hereby incorporated by reference in their entireties.

[0051] In certain embodiments, the RNAi constructs comprise one or more phosphorothioate internucleotide linkages. The phosphorothioate internucleotide linkages may be present in the sense strand, antisense strand, or both strands of the RNAi constructs. For instance, in some embodiments, the sense strand comprises 1, 2, 3, 4, 5, 6, 7, 8, or more phosphorothioate internucleotide linkages. In other embodiments, the antisense strand comprises 1, 2, 3, 4, 5, 6, 7, 8, or more phosphorothioate internucleotide linkages. In still other embodiments, both strands comprise 1, 2, 3, 4, 5, 6, 7, 8, or more phosphorothioate internucleotide linkages. The RNAi constructs can comprise one or more phosphorothioate internucleotide linkages at the 3′-end, the 5′-end, or both the 3′- and 5′-ends of the sense strand, the antisense strand, or both strands. For instance, in certain embodiments, the RNAi construct comprises about 1 to about 6 or more (e.g., about 1, 2, 3, 4, 5, 6 or more) consecutive phosphorothioate internucleotide linkages at the 3′-end of the sense strand, the antisense strand, or both strands. In other embodiments, the RNAi construct comprises about 1 to about 6 or more (e.g., about 1, 2, 3, 4, 5, 6 or more) consecutive phosphorothioate internucleotide linkages at the 5′-end of the sense strand, the antisense strand, or both strands. In one embodiment, the RNAi construct comprises a single phosphorothioate internucleotide linkage at the 3′ end of the sense strand and a single phosphorothioate internucleotide linkage at the 3′ end of the antisense strand. In another embodiment, the RNAi construct comprises two consecutive phosphorothioate internucleotide linkages at the 3′ end of the antisense strand (i.e. a phosphorothioate internucleotide linkage at the first and second internucleotide linkages at the 3′ end of the antisense strand). In another embodiment, the RNAi construct comprises two consecutive phosphorothioate internucleotide linkages at both the 3′ and 5′ ends of the antisense strand. In yet another embodiment, the RNAi construct comprises two consecutive phosphorothioate internucleotide linkages at both the 3′ and 5′ ends of the antisense strand and two consecutive phosphorothioate internucleotide linkages at the 5′ end of the sense strand. In still another embodiment, the RNAi construct comprises two consecutive phosphorothioate internucleotide linkages at both the 3′ and 5′ ends of the antisense strand and two consecutive phosphorothioate internucleotide linkages at both the 3′ and 5′ ends of the sense strand (i.e. a phosphorothioate internucleotide linkage at the first and second internucleotide linkages at both the 5′ and 3′ ends of the antisense strand and a phosphorothioate internucleotide linkage at the first and second internucleotide linkages at both the 5′ and 3′ ends of the sense strand). In any of the embodiments in which one or both strands comprises one or more phosphorothioate internucleotide linkages, the remaining internucleotide linkages within the strands can be the natural 3′ to 5′ phosphodiester linkages. For instance, in some embodiments, each internucleotide linkage of the sense and antisense strands is selected from phosphodiester and phosphorothioate, wherein at least one internucleotide linkage is a phosphorothioate.

[0052] In embodiments in which the RNAi construct comprises a nucleotide overhang, two or more of the unpaired nucleotides in the overhang can be connected by a phosphorothioate internucleotide linkage. In certain embodiments, all the unpaired nucleotides in a nucleotide overhang at the 3′ end of the antisense strand and/or the sense strand are connected by phosphorothioate internucleotide linkages. In other embodiments, all the unpaired nucleotides in a nucleotide overhang at the 5′ end of the antisense strand and/or the sense strand are connected by phosphorothioate internucleotide linkages. In still other embodiments, all the unpaired nucleotides in any nucleotide overhang are connected by phosphorothioate internucleotide linkages.

[0053] In certain embodiments, the modified nucleotides incorporated into one or both of the strands of the RNAi constructs of the invention have a modification of the nucleobase (also referred to herein as “base”). A “modified nucleobase” or “modified base” refers to a base other than the naturally occurring purine bases adenine (A) and guanine (G) and pyrimidine bases thymine (T), cytosine (C), and uracil (U). Modified nucleobases can be synthetic or naturally occurring modifications and include, but are not limited to, universal bases, 5-methylcytosine (5-me-C), 5-hydroxymethyl cytosine, xanthine (X), hypoxanthine (I), 2-aminoadenine, 6-methyladenine, 6-methylguanine, and other alkyl derivatives of adenine and guanine, 2-propyland other alkyl derivatives of adenine and guanine, 2-thiouracil, 2-thiothymine and 2-thiocytosine, 5-halouracil and cytosine, 5-propynyl uracil and cytosine, 6-azo uracil, cytosine and thymine, 5-uracil (pseudouracil), 4-thiouracil, 8-halo, 8-amino, 8-thiol, 8-thioalkyl, 8-hydroxyl and other 8-substituted adenines and guanines, 5-halo, particularly 5-bromo, 5-trifluoromethyl and other 5-substituted uracils and cytosines, 7-methylguanine and 7-methyladenine, 8-azaguanine and 8-azaadenine, 7-deazaguanine and 7-daazaadenine and 3-deazaguanine and 3-deazaadenine.

[0054] In some embodiments, the modified base is a universal base. A “universal base” refers to a base analog that indiscriminately forms base pairs with all of the natural bases in RNA and DNA without altering the double helical structure of the resulting duplex region. Universal bases are known to those of skill in the art and include, but are not limited to, inosine, C-phenyl, C-naphthyl and other aromatic derivatives, azole carboxamides, and nitroazole derivatives, such as 3-nitropyrrole, 4-nitroindole, 5-nitroindole, and 6-nitroindole.

[0055] Other suitable modified bases that can be incorporated into the RNAi constructs of the invention include those described in Herdewijn, Antisense Nucleic Acid Drug Dev., Vol. 10:297-310, 2000 and Peacock et al., J. Org. Chern., Vol. 76:7295-7300, 2011, both of which are hereby incorporated by reference in their entireties. The skilled person is well aware that guanine, cytosine, adenine, thymine, and uracil may be replaced by other nucleobases, such as the modified nucleobases described above, without substantially altering the base pairing properties of a polynucleotide comprising a nucleotide bearing such replacement nucleobase.

[0056] In some embodiments of the RNAi constructs of the invention, the 5′ end of the sense strand, antisense strand, or both the antisense and sense strands comprises a phosphate moiety. As used herein, the term “phosphate moiety” refers to a terminal phosphate group that includes unmodified phosphates (—O—P═O)(OH)OH) as well as modified phosphates. Modified phosphates include phosphates in which one or more of the O and OH groups is replaced with H, O, S, N(R) or alkyl where R is H, an amino protecting group or unsubstituted or substituted alkyl. Exemplary phosphate moieties include, but are not limited to, 5′-monophosphate; 5′ diphosphate; 5′-triphosphate; 5′-guanosine cap (7-methylated or non-methylated); 5′-adenosinecap or any other modified or unmodified nucleotide cap structure; 5′-monothiophosphate (phosphorothioate); 5′-monodithiophosphate (phosphorodithioate); 5′-alpha-thiotriphosphate; 5′-gamma-thiotriphosphate, 5′-phosphoramidates; 5′-vinylphosphates; 5′-alkylphosphonates (e.g., alkyl=methyl, ethyl, isopropyl, propyl, etc.); and 5′-alkyletherphosphonates (e.g., alkylether=methoxymethyl, ethoxymethyl, etc.).

[0057] The modified nucleotides that can be incorporated into the RNAi constructs of the invention may have more than one chemical modification described herein. For instance, the modified nucleotide may have a modification to the ribose sugar as well as a modification to the nucleobase. By way of example, a modified nucleotide may comprise a 2′ sugar modification (e.g. 2′-fluoro or 2′-methyl) and comprise a modified base (e.g. 5-methyl cytosine or pseudouracil). In other embodiments, the modified nucleotide may comprise a sugar modification in combination with a modification to the 5′ phosphate that would create a modified internucleotide or internucleoside linkage when the modified nucleotide was incorporated into a polynucleotide. For instance, in some embodiments, the modified nucleotide may comprise a sugar modification, such as a 2′-fluoro modification, a 2′-O-methyl modification, or a bicyclic sugar modification, as well as a 5′ phosphorothioate group. Accordingly, in some embodiments, one or both strands of the RNAi constructs of the invention comprise a combination of 2′ modified nucleotides or BNAs and phosphorothioate internucleotide linkages. In certain embodiments, both the sense and antisense strands of the RNAi constructs of the invention comprise a combination of 2′-fluoro modified nucleotides, 2′-O-methyl modified nucleotides, and phosphorothioate internucleotide linkages. Exemplary RNAi constructs comprising modified nucleotides and internucleotide linkages are shown in Table 2.

### Function of RNAi Constructs

[0058] Preferably, the RNAi constructs of the invention reduce or inhibit the expression of PNPLA3 in cells, particularly liver cells. Accordingly, in one embodiment, the present invention provides a method of reducing PNPLA3 expression in a cell by contacting the cell with any RNAi construct described herein. The cell may be in vitro or in vivo. PNPLA3 expression can be assessed by measuring the amount or level of PNPLA3 mRNA, PNPLA3 protein, or another biomarker linked to PNPLA3 expression. The reduction of PNPLA3 expression in cells or animals treated with an RNAi construct of the invention can be determined relative to the PNPLA3 expression in cells or animals not treated with the RNAi construct or treated with a control RNAi construct. For instance, in some embodiments, reduction of PNPLA3 expression is assessed by (a) measuring the amount or level of PNPLA3 mRNA in liver cells treated with a RNAi construct of the invention, (b) measuring the amount or level of PNPLA3 mRNA in liver cells treated with a control RNAi construct (e.g., RNAi agent directed to a RNA molecule not expressed in liver cells or a RNAi construct having a nonsense or scrambled sequence) or no construct, and (c) comparing the measured PNPLA3 mRNA levels from treated cells in (a) to the measured PNPLA3 mRNA levels from control cells in (b). The PNPLA3 mRNA levels in the treated cells and controls cells can be normalized to RNA levels for a control gene (e.g. 18S ribosomal RNA) prior to comparison. PNPLA3 mRNA levels can be measured by a variety of methods, including Northern blot analysis, nuclease protection assays, fluorescence in situ hybridization (FISH), reverse-transcriptase (RT)-PCR, real-time RT-PCR, quantitative PCR, and the like.

[0059] In other embodiments, reduction of PNPLA3 expression is assessed by (a) measuring the amount or level of PNPLA3 protein in liver cells treated with a RNAi construct of the invention, (b) measuring the amount or level of PNPLA3 protein in liver cells treated with a control RNAi construct (e.g. RNAi agent directed to a RNA molecule not expressed in liver cells or a RNAi construct having a nonsense or scrambled sequence) or no construct, and (c) comparing the measured PNPLA3 protein levels from treated cells in (a) to the measured PNPLA3 protein levels from control cells in (b). Methods of measuring PNPLA3 protein levels are known to those of skill in the art, and include Western Blots, immunoassays (e.g. ELISA), and flow cytometry. An exemplary immunoassay-based method for assessing PNPLA3 protein expression is described in Example 2. Example 3 describes an exemplary method for measuring PNPLA3 mRNA using RNA FISH. Any method capable of measuring PNPLA3 mRNA or protein can be used to assess the efficacy of the RNAi constructs of the invention.

[0060] In some embodiments, the methods to assess PNPLA3 expression levels are performed in vitro in cells that natively express PNPLA3 (e.g. liver cells) or cells that have been engineered to express PNPLA3. In certain embodiments, the methods are performed in vitro in liver cells. Suitable liver cells include, but are not limited to, primary hepatocytes (e.g. human, non-human primate, or rodent hepatocytes), HepAD38 cells, HuH-6 cells, HuH-7 cells, HuH-5-2 cells, BNLCL2 cells, Hep3B cells, or HepG2 cells. In one embodiment, the liver cells are Hep3B cells. In another embodiment, the liver cells are HepG2 cells.

[0061] In other embodiments, the methods to assess PNPLA3 expression levels are performed in vivo. The RNAi constructs and any control RNAi constructs can be administered to an animal (e.g. rodent or non-human primate) and PNPLA3 mRNA or protein levels assessed in liver tissue harvested from the animal following treatment. Alternatively or additionally, a biomarker or functional phenotype associated with PNPLA3 expression can be assessed in the treated animals.

[0062] In certain embodiments, expression of PNPLA3 is reduced in liver cells by at least 10%, at least 15%, at least 20%, at least 25%, at least 30%, at least 35%, at least 40%, at least 45%, or at least 50% by an RNAi construct of the invention. In some embodiments, expression of PNPLA3 is reduced in liver cells by at least 60%, at least 65%, at least 70%, at least 75%, at least 80%, or at least 85% by an RNAi construct of the invention. In other embodiments, the expression of PNPLA3 is reduced in liver cells by about 90% or more, e.g., 91%, 92%, 93%, 94%, 95%, 96%, 97%, 98%, 99%, or more by an RNAi construct of the invention. The percent reduction of PNPLA3 expression can be measured by any of the methods described herein as well as others known in the art. For instance, in certain embodiments, the RNAi constructs of the invention inhibit at least 45% of PNPLA3 expression at 5 nM in Hep3B cells (contains wild type PNPLA3) in vitro. In related embodiments, the RNAi constructs of the invention inhibit at least 50%, at least 55%, at least 60%, at least 65%, at least 70%, or at least 75% of PNPLA3 expression at 5 nM in Hep3B cells in vitro. In other embodiments, the RNAi constructs of the invention inhibit at least 80%, at least 85%, at least 90%, at least 92%, at least 94%, at least 96%, or at least 98% of PNPLA3 expression at 5 nM in Hep3B cells in vitro. In certain embodiments, the RNAi constructs of the invention inhibit at least 45% of PNPLA3 expression at 5 nM in HepG2 cells (contains the PNPLA3-rs738409-rs738408 double minor allele) in vitro. In related embodiments, the RNAi constructs of the invention inhibit at least 50%, at least 55%, at least 60%, at least 65%, at least 70%, or at least 75% of PNPLA3 expression at 5 nM in HepG2 cells in vitro. In other embodiments, the RNAi constructs of the invention inhibit at least 80%, at least 85%, at least 90%, at least 92%, at least 94%, at least 96%, or at least 98% of PNPLA3 expression at 5 nM in HepG2 cells in vitro. In certain embodiments, the RNAi constructs of the invention inhibit at least 45% of PNPLA3 expression at 5 nM in CHO transfected cells expressing human PNPLA3 I148I or I148M cells in vitro. In related embodiments, the RNAi constructs of the invention inhibit at least 50%, at least 55%, at least 60%, at least 65%, at least 70%, or at least 75% of PNPLA3 expression at 5 nM in CHO transfected cells expressing human PNPLA3 I148I or I148M in vitro. In other embodiments, the RNAi constructs of the invention inhibit at least 80%, at least 85%, at least 90%, at least 92%, at least 94%, at least 96%, or at least 98% of PNPLA3 expression at 5 nM in CHO transfected cells expressing human PNPLA3I148I or I148M in vitro. Reduction of PNPLA3 can be measured using a variety of techniques including RNA FISH or droplet digital PCR, as described in Examples 2 and 3.

[0063] In some embodiments, an IC50 value is calculated to assess the potency of an RNAi construct of the invention for inhibiting PNPLA3 expression in liver cells. An “IC50 value” is the dose/concentration required to achieve 50% inhibition of a biological or biochemical function. The IC50 value of any particular substance or antagonist can be determined by constructing a dose-response curve and examining the effect of different concentrations of the substance or antagonist on expression levels or functional activity in any assay. IC50 values can be calculated for a given antagonist or substance by determining the concentration needed to inhibit half of the maximum biological response or native expression levels. Thus, the IC50 value for any RNAi construct can be calculated by determining the concentration of the RNAi construct needed to inhibit half of the native PNPLA3 expression level in liver cells (e.g. PNPLA3 expression level in control liver cells) in any assay, such as the immunoassay or RNA FISH assay or droplet digital PCR assays described in the Examples. The RNAi constructs of the invention may inhibit PNPLA3 expression in liver cells (e.g. Hep3B cells) with an IC50 of less than about 20 nM. For example, the RNAi constructs inhibit PNPLA3 expression in liver cells with an IC50 of about 0.001 nM to about 20 nM, about 0.001 nM to about 10 nM, about 0.001 nM to about 5 nM, about 0.001 nM to about 1 nM, about 0.1 nM to about 10 nM, about 0.1 nM to about 5 nM, or about 0.1 nM to about 1 nM. In certain embodiments, the RNAi construct inhibits PNPLA3 expression in liver cells (e.g. Hep3B cells) with an IC50 of about 1 nM to about 10 nM. The RNAi constructs of the invention may inhibit PNPLA3 expression in liver cells (e.g. HepG2 cells) with an IC50 of less than about 20 nM. For example, the RNAi constructs inhibit PNPLA3 expression in liver cells with an IC50 of about 0.001 nM to about 20 nM, about 0.001 nM to about 10 nM, about 0.001 nM to about 5 nM, about 0.001 nM to about 1 nM, about 0.1 nM to about 10 nM, about 0.1 nM to about 5 nM, or about 0.1 nM to about 1 nM. In certain embodiments, the RNAi construct inhibits PNPLA3 expression in liver cells (e.g. HepG2 cells) with an IC50 of about 1 nM to about 10 nM. The RNAi constructs of the invention may inhibit PNPLA3 expression in liver cells (e.g. CHO transfected cells expressing human PNPLA3 I148I or I148M) with an IC50 of less than about 20 nM. For example, the RNAi constructs inhibit PNPLA3 expression in liver cells with an IC50 of about 0.001 nM to about 20 nM, about 0.001 nM to about 10 nM, about 0.001 nM to about 5 nM, about 0.001 nM to about 1 nM, about 0.1 nM to about 10 nM, about 0.1 nM to about 5 nM, or about 0.1 nM to about 1 nM. In certain embodiments, the RNAi construct inhibits PNPLA3 expression in liver cells (e.g. CHO transfected cells expressing human PNPLA3 I148I or I148M) with an IC50 of about 1 nM to about 10 nM.

[0064] The RNAi constructs of the invention can readily be made using techniques known in the art, for example, using conventional nucleic acid solid phase synthesis. The polynucleotides of the RNAi constructs can be assembled on a suitable nucleic acid synthesizer utilizing standard nucleotide or nucleoside precursors (e.g. phosphoramidites). Automated nucleic acid synthesizers are sold commercially by several vendors, including DNA/RNA synthesizers from Applied Biosystems (Foster City, CA), MerMade synthesizers from BioAutomation (Irving, TX), and OligoPilot synthesizers from GE Healthcare Life Sciences (Pittsburgh, PA).

[0065] The 2′ silyl protecting group can be used in conjunction with acid labile dimethoxytrityl (DMT) at the 5′ position of ribonucleosides to synthesize oligonucleotides via phosphoramidite chemistry. Final deprotection conditions are known not to significantly degrade RNA products. All syntheses can be conducted in any automated or manual synthesizer on large, medium, or small scale. The syntheses may also be carried out in multiple well plates, columns, or glass slides.

[0066] The 2′-O-silyl group can be removed via exposure to fluoride ions, which can include any source of fluoride ion, e.g., those salts containing fluoride ion paired with inorganic counterions, e.g., cesium fluoride and potassium fluoride or those salts containing fluoride ion paired with an organic counterion, e.g., a tetraalkylammonium fluoride. A crown ether catalyst can be utilized in combination with the inorganic fluoride in the deprotection reaction. Preferred fluoride ion source are tetrabutylammonium fluoride or aminohydrofluorides (e.g., combining aqueous HF with triethylamine in a dipolar aprotic solvent, e.g., dimethylformamide).

[0067] The choice of protecting groups for use on the phosphite triesters and phosphotriesters can alter the stability of the triesters towards fluoride. M ethyl protection of the phosphotriester or phosphitetriester can stabilize the linkage against fluoride ions and improve process yields.

[0068] Since ribonucleosides have a reactive 2′ hydroxyl substituent, it can be desirable to protect the reactive 2′ position in RNA with a protecting group that is orthogonal to a 5′-O-dimethoxytrityl protecting group, e.g., one stable to treatment with acid. Silyl protecting groups meet this criterion and can be readily removed in a final fluoride deprotection step that can result in minimal RNA degradation.

[0069] Tetrazole catalysts can be used in the standard phosphoramidite coupling reaction. Preferred catalysts include, e.g., tetrazole, S-ethyl-tetrazole, benzylthiotetrazole, pnitrophenyltetrazole.

[0070] As can be appreciated by the skilled artisan, further methods of synthesizing the RNAi constructs described herein will be evident to those of ordinary skill in the art. Additionally, the various synthetic steps may be performed in an alternate sequence or order to give the desired compounds. Other synthetic chemistry transformations, protecting groups (e.g., for hydroxyl, amino, etc. present on the bases) and protecting group methodologies (protection and deprotection) useful in synthesizing the RNAi constructs described herein are known in the art and include, for example, those such as described in R. Larock, Comprehensive Organic Transformations, VCH Publishers (1989); T. W. Greene and P. G. M. Wuts, Protective Groups in Organic Synthesis, 2d. Ed., John Wiley and Sons (1991); L. Fieser and M. Fieser, Fieser and Fieser's Reagents for Organic Synthesis, John Wiley and Sons (1994); and L. Paquette, ed., Encyclopedia of Reagents for Organic Synthesis, John Wiley and Sons (1995), and subsequent editions thereof Custom synthesis of RNAi agents is also available from several commercial vendors, including Dharmacon, Inc. (Lafayette, CO), AxoLabs GmbH (Kulmbach, Germany), and Ambion, Inc. (Foster City, CA).

[0071] The RNAi constructs of the invention may comprise a ligand. As used herein, a “ligand” refers to any compound or molecule that is capable of interacting with another compound or molecule, directly or indirectly. The interaction of a ligand with another compound or molecule may elicit a biological response (e.g. initiate a signal transduction cascade, induce receptor mediated endocytosis) or may just be a physical association. The ligand can modify one or more properties of the double-stranded RNA molecule to which is attached, such as the pharmacodynamic, pharmacokinetic, binding, absorption, cellular distribution, cellular uptake, charge and/or clearance properties of the RNA molecule.

[0072] The ligand may comprise a serum protein (e.g., human serum albumin, low-density lipoprotein, globulin), a cholesterol moiety, a vitamin (biotin, vitamin E, vitamin B 12), a folate moiety, a steroid, a bile acid (e.g. cholic acid), a fatty acid (e.g., palmitic acid, myristic acid), a carbohydrate (e.g., a dextran, pullulan, chitin, chitosan, inulin, cyclodextrin or hyaluronic acid), a glycoside, a phospholipid, or antibody or binding fragment thereof (e.g. antibody or binding fragment that targets the RNAi construct to a specific cell type, such as liver). Other examples of ligands include dyes, intercalating agents (e.g. acridines), cross-linkers (e.g. psoralene, mitomycin C), porphyrins (TPPC4, texaphyrin, Sapphyrin), polycyclic aromatic hydrocarbons (e.g., phenazine, dihydrophenazine), artificial endonucleases (e.g. EDTA), lipophilic molecules, e.g, adamantane acetic acid, 1-pyrene butyric acid, dihydrotestosterone, 1,3-BisO (hexadecyl)glycerol, geranyloxyhexyl group, hexadecylglycerol, borneol, menthol, 1,3-propanediol, heptadecyl group, 03-(oleoyl) lithocholic acid, 03-(oleoyl) cholenic acid, dimethoxytrityl, or phenoxazine), peptides (e.g., antennapedia peptide, Tat peptide, RGD peptides), alkylating agents, polymers, such as polyethylene glycol (PEG) (e.g., PEG-40K), poly amino acids, and polyamines (e.g. spermine, spermidine).

[0073] In certain embodiments, the ligands have endosomolytic properties. The endosomolytic ligands promote the lysis of the endosome and/or transport of the RNAi construct of the invention, or its components, from the endosome to the cytoplasm of the cell. The endosomolytic ligand may be a polycationic peptide or peptidomimetic which shows pH dependent membrane activity and fusogenicity. In one embodiment, the endosomolytic ligand assumes its active conformation at endosomal pH. The “active” conformation is that conformation in which the endosomolytic ligand promotes lysis of the endosome and/or transport of the RNAi construct of the invention, or its components, from the endosome to the cytoplasm of the cell. Exemplary endosomolytic ligands include the GALA peptide (Subbarao et al., Biochemistry, Vol. 26:2964-2972, 1987), the EALA peptide (Vogel et al., J. Am. Chern. Soc., Vol. 118:1581-1586, 1996), and their derivatives (Turk et al., Biochem. Biophys. Acta, Vol. 1559:56-68, 2002). In one embodiment, the endosomolytic component may contain a chemical group (e.g., an amino acid) which will undergo a change in charge or protonation in response to a change in pH. The endosomolytic component may be linear or branched.

[0074] In some embodiments, the ligand comprises a lipid or other hydrophobic molecule. In one embodiment, the ligand comprises a cholesterol moiety or other steroid. Cholesterol conjugated oligonucleotides have been reported to be more active than their unconjugated counterparts (Manoharan, Antisense Nucleic Acid Drug Development, Vol. 12: 103-228, 2002). Ligands comprising cholesterol moieties and other lipids for conjugation to nucleic acid molecules have also been described in U.S. Pat. Nos. 7,851,615; 7,745,608; and 7,833,992, all of which are hereby incorporated by reference in their entireties. In another embodiment, the ligand comprises a folate moiety. Polynucleotides conjugated to folate moieties can be taken up by cells via a receptor-mediated endocytosis pathway. Such folate-polynucleotide conjugates are described in U.S. Pat. No. 8,188,247, which is hereby incorporated by reference in its entirety.

[0075] Given that PNPLA3 is expressed in liver cells (e.g. hepatocytes), in certain embodiments, it is desirable to specifically deliver the RNAi construct to those liver cells. In some embodiments, RNAi constructs can be specifically targeted to the liver by employing ligands that bind to or interact with proteins expressed on the surface of liver cells. For example, in certain embodiments, the ligands may comprise antigen binding proteins (e.g. antibodies or binding fragments thereof (e.g. Fab, scFv)) that specifically bind to a receptor expressed on hepatocytes.

[0076] In certain embodiments, the ligand comprises a carbohydrate. A “carbohydrate” refers to a compound made up of one or more monosaccharide units having at least 6 carbon atoms (which can be linear, branched or cyclic) with an oxygen, nitrogen or sulfur atom bonded to each carbon atom. Carbohydrates include, but are not limited to, the sugars (e.g., monosaccharides, disaccharides, trisaccharides, tetrasaccharides, and oligosaccharides containing from about 4, 5, 6, 7, 8, or 9 monosaccharide units), and polysaccharides, such as starches, glycogen, cellulose and polysaccharide gums. In some embodiments, the carbohydrate incorporated into the ligand is a monosaccharide selected from a pentose, hexose, or heptose and di- and tri-saccharides including such monosaccharide units. In other embodiments, the carbohydrate incorporated into the ligand is an amino sugar, such as galactosamine, glucosamine, N-acetylgalactosamine, and N-acetylglucosamine.

[0077] In some embodiments, the ligand comprises a hexose or hexosamine. The hexose may be selected from glucose, galactose, mannose, fucose, or fructose. The hexosamine may be selected from fructosamine, galactosamine, glucosamine, or mannosamine. In certain embodiments, the ligand comprises glucose, galactose, galactosamine, or glucosamine. In one embodiment, the ligand comprises glucose, glucosamine, or N-acetylglucosamine. In another embodiment, the ligand comprises galactose, galactosamine, or N-acetyl-galactosamine. In particular embodiments, the ligand comprises N-acetyl-galactosamine. Ligands comprising glucose, galactose, and N-acetyl-galactosamine (GalNAc) are particularly effective in targeting compounds to liver cells. See, e.g., D'Souza and Devarajan, J. Control Release, Vol. 203:126-139, 2015. Examples of GalNAc- or galactose-containing ligands that can be incorporated into the RNAi constructs of the invention are described in U.S. Pat. Nos. 7,491,805; 8,106,022; and 8,877,917; U.S. Patent Publication No. 20030130186; and WIPO Publication No. WO2013166155, all of which are hereby incorporated by reference in their entireties.

[0078] In certain embodiments, the ligand comprises a multivalent carbohydrate moiety. As used herein, a “multivalent carbohydrate moiety” refers to a moiety comprising two or more carbohydrate units capable of independently binding or interacting with other molecules. For example, a multivalent carbohydrate moiety comprises two or more binding domains comprised of carbohydrates that can bind to two or more different molecules or two or more different sites on the same molecule. The valency of the carbohydrate moiety denotes the number of individual binding domains within the carbohydrate moiety. For instance, the terms “monovalent,” “bivalent,” “trivalent,” and “tetravalent” with reference to the carbohydrate moiety refer to carbohydrate moieties with one, two, three, and four binding domains, respectively. The multivalent carbohydrate moiety may comprise a multivalent lactose moiety, a multivalent galactose moiety, a multivalent glucose moiety, a multivalent N-acetyl-galactosamine moiety, a multivalent N-acetyl-glucosamine moiety, a multivalent mannose moiety, or a multivalent fucose moiety. In some embodiments, the ligand comprises a multivalent galactose moiety. In other embodiments, the ligand comprises a multivalent N-acetyl-galactosamine moiety. In these and other embodiments, the multivalent carbohydrate moiety is bivalent, trivalent, or tetravalent. In such embodiments, the multivalent carbohydrate moiety can be bi-antennary or tri-antennary. In one particular embodiment, the multivalent N-acetyl-galactosamine moiety is trivalent or tetravalent. In another particular embodiment, the multivalent galactose moiety is trivalent or tetravalent. Exemplary trivalent and tetravalent GalNAc-containing ligands for incorporation into the RNAi constructs of the invention are described in detail below.

[0079] The ligand can be attached or conjugated to the RNA molecule of the RNAi construct directly or indirectly. For instance, in some embodiments, the ligand is covalently attached directly to the sense or antisense strand of the RNAi construct. In other embodiments, the ligand is covalently attached via a linker to the sense or antisense strand of the RNAi construct. The ligand can be attached to nucleobases, sugar moieties, or internucleotide linkages of polynucleotides (e.g. sense strand or antisense strand) of the RNAi constructs of the invention. Conjugation or attachment to purine nucleobases or derivatives thereof can occur at any position including, endocyclic and exocyclic atoms. In certain embodiments, the 2-, 6-, 7-, or 8-positions of a purine nucleobase are attached to a ligand. Conjugation or attachment to pyrimidine nucleobases or derivatives thereof can also occur at any position. In some embodiments, the 2-, 5-, and 6-positions of a pyrimidine nucleobase can be attached to a ligand. Conjugation or attachment to sugar moieties of nucleotides can occur at any carbon atom. Example carbon atoms of a sugar moiety that can be attached to a ligand include the 2′, 3′, and 5′ carbon atoms. The 1′ position can also be attached to a ligand, such as in an a basic residue. Internucleotide linkages can also support ligand attachments. For phosphorus-containing linkages (e.g., phosphodiester, phosphorothioate, phosphorodithiotate, phosphoroamidate, and the like), the ligand can be attached directly to the phosphorus atom or to an O, N, or S atom bound to the phosphorus atom. For amine- or amide-containing internucleoside linkages (e.g., PNA), the ligand can be attached to the nitrogen atom of the amine or amide or to an adjacent carbon atom.

[0080] In certain embodiments, the ligand may be attached to the 3′ or 5′ end of either the sense or antisense strand. In certain embodiments, the ligand is covalently attached to the 5′ end of the sense strand. In other embodiments, the ligand is covalently attached to the 3′ end of the sense strand. For example, in some embodiments, the ligand is attached to the 3′-terminal nucleotide of the sense strand. In certain such embodiments, the ligand is attached at the 3′-position of the 3′-terminal nucleotide of the sense strand. In alternative embodiments, the ligand is attached near the 3′ end of the sense strand, but before one or more terminal nucleotides (i.e. before 1, 2, 3, or 4 terminal nucleotides). In some embodiments, the ligand is attached at the 2′-position of the sugar of the 3′-terminal nucleotide of the sense strand.

[0081] In certain embodiments, the ligand is attached to the sense or antisense strand via a linker. A “linker” is an atom or group of atoms that covalently joins a ligand to a polynucleotide component of the RNAi construct. The linker may be from about 1 to about 30 atoms in length, from about 2 to about 28 atoms in length, from about 3 to about 26 atoms in length, from about 4 to about 24 atoms in length, from about 6 to about 20 atoms in length, from about 7 to about 20 atoms in length, from about 8 to about 20 atoms in length, from about 8 to about 18 atoms in length, from about 10 to about 18 atoms in length, and from about 12 to about 18 atoms in length. In some embodiments, the linker may comprise a bifunctional linking moiety, which generally comprises an alkyl moiety with two functional groups. One of the functional groups is selected to bind to the compound of interest (e.g. sense or antisense strand of the RNAi construct) and the other is selected to bind essentially any selected group, such as a ligand as described herein. In certain embodiments, the linker comprises a chain structure or an oligomer of repeating units, such as ethylene glycol or amino acid units. Examples of functional groups that are typically employed in a bifunctional linking moiety include, but are not limited to, electrophiles for reacting with nucleophilic groups and nucleophiles for reacting with electrophilic groups. In some embodiments, bifunctional linking moieties include amino, hydroxyl, carboxylic acid, thiol, unsaturations (e.g., double or triple bonds), and the like.

[0082] Linkers that may be used to attach a ligand to the sense or antisense strand in the RNAi constructs of the invention include, but are not limited to, pyrrolidine, 8-amino-3,6-di oxaoctanoic acid, succinimidyl 4-(N-maleimidomethyl) cyclohexane-1-carboxylate, 6-aminohexanoic acid, substituted C1-C10 alkyl, substituted or unsubstituted C2-C10 alkenyl or substituted or unsubstituted C2-C10 alkynyl. Preferred substituent groups for such linkers include, but are not limited to, hydroxyl, amino, alkoxy, carboxy, benzyl, phenyl, nitro, thiol, thioalkoxy, halogen, alkyl, aryl, alkenyl and alkynyl.

[0083] In certain embodiments, the linkers are cleavable. A cleavable linker is one which is sufficiently stable outside the cell, but which upon entry into a target cell is cleaved to release the two parts the linker is holding together. In some embodiments, the cleavable linker is cleaved at least 10 times, 20 times, 30 times, 40 times, 50 times, 60 times, 70 times, 80 times, 90 times, or more, or at least 100 times faster in the target cell or under a first reference condition (which can, e.g., be selected to mimic or represent intracellular conditions) than in the blood of a subject, or under a second reference condition (which can, e.g., be selected to mimic or represent conditions found in the blood or serum).

[0084] Cleavable linkers are susceptible to cleavage agents, e.g., pH, redox potential or the presence of degradative molecules. Generally, cleavage agents are more prevalent or found at higher levels or activities inside cells than in serum or blood. Examples of such degradative agents include: redox agents which are selected for particular substrates or which have no substrate specificity, including, e.g., oxidative or reductive enzymes or reductive agents such as mercaptans, present in cells, that can degrade a redox cleavable linker by reduction; esterases; endosomes or agents that can create an acidic environment, e.g., those that result in a pH of five or lower; enzymes that can hydrolyze or degrade an acid cleavable linker by acting as a general acid, peptidases (which can be substrate specific), and phosphatases.

[0085] A cleavable linker may comprise a moiety that is susceptible to pH. The pH of human serum is 7.4, while the average intracellular pH is slightly lower, ranging from about 7.1-7.3. Endosomes have a more acidic pH, in the range of 5.5-6.0, and lysosomes have an even more acidic pH at around 5.0. Some linkers will have a cleavable group that is cleaved at a preferred pH, thereby releasing the RNA molecule from the ligand inside the cell, or into the desired compartment of the cell.

[0086] A linker can include a cleavable group that is cleavable by a particular enzyme. The type of cleavable group incorporated into a linker can depend on the cell to be targeted. For example, liver-targeting ligands can be linked to RNA molecules through a linker that includes an ester group. Liver cells are rich in esterases, and therefore the linker will be cleaved more efficiently in liver cells than in cell types that are not esterase-rich. Other types of cells rich in esterases include cells of the lung, renal cortex, and testis. Linkers that contain peptide bonds can be used when targeting cells rich in peptidases, such as liver cells and synoviocytes.

[0087] In general, the suitability of a candidate cleavable linker can be evaluated by testing the ability of a degradative agent (or condition) to cleave the candidate linker. It will also be desirable to also test the candidate cleavable linker for the ability to resist cleavage in the blood or when in contact with other non-target tissue. Thus, one can determine the relative susceptibility to cleavage between a first and a second condition, where the first is selected to be indicative of cleavage in a target cell and the second is selected to be indicative of cleavage in other tissues or biological fluids, e.g., blood or serum. The evaluations can be carried out in cell free systems, in cells, in cell culture, in organ or tissue culture, or in whole animals. It may be useful to make initial evaluations in cell-free or culture conditions and to confirm by further evaluations in whole animals. In some embodiments, useful candidate linkers are cleaved at least 2, 4, 10, 20, 50, 70, or 100 times faster in the cell (or under in vitro conditions selected to mimic intracellular conditions) as compared to blood or serum (or under in vitro conditions selected to mimic extracellular conditions).

[0088] In other embodiments, redox cleavable linkers are utilized. Redox cleavable linkers are cleaved upon reduction or oxidation. An example of reductively cleavable group is a disulfide linking group (—S—S—). To determine if a candidate cleavable linker is a suitable “reductively cleavable linker,” or for example is suitable for use with a particular RNAi construct and particular ligand, one can use one or more methods described herein. For example, a candidate linker can be evaluated by incubation with dithiothreitol (DTT), or other reducing agent known in the art, which mimics the rate of cleavage that would be observed in a cell, e.g., a target cell. The candidate linkers can also be evaluated under conditions which are selected to mimic blood or serum conditions. In a specific embodiment, candidate linkers are cleaved by at most 10% in the blood. In other embodiments, useful candidate linkers are degraded at least 2, 4, 10, 20, 50,70, or 100 times faster in the cell (or under in vitro conditions selected to mimic intracellular conditions) as compared to blood (or under in vitro conditions selected to mimic extracellular conditions).

[0089] In yet other embodiments, phosphate-based cleavable linkers are cleaved by agents that degrade or hydrolyze the phosphate group. An example of an agent that hydrolyzes phosphate groups in cells are enzymes, such as phosphatases in cells. Examples of phosphate-based cleavable groups are —O—P(O)(ORk)-O—, —O—P(S)(ORk)-O—, —O—P(S)(SRk)-O—, —S—P(O)(ORk)-O—, —O—P(O)(ORk)-S—, —S—P(O)(ORk)-S—, —O—P(S)(ORk)-S—, —S—P(S)(ORk)-O—, —O—P(O)(Rk)-O—, —O—P(S)(Rk)-O—, —S—P(O)(Rk)-O—, —S—P(S)(Rk)-O—, —S—P(O)(Rk)-S—, —O—P(S)(Rk)-S—. Specific embodiments include —O—P(O)(OH)—O—, —O—P(S)(OH)—O—, —O—P(S)(SH)—O—, —S—P(O)(OH)—O—, —O—P(O)(OH)—S—, —S—P(O)(OH)—S—, —O—P(S)(OH)—S—, —SP(S)(OH)—O—, —O—P(O)(H)—O—, —O—P(S)(H)—O—, —S—P(O)(H)—O—, —S—P(S)(H)—O—, —S—P(O)(H)—S—, —O—P(S)(H)—S—. Another specific embodiment is —O—P(O)(OH)—O—. These candidate linkers can be evaluated using methods analogous to those described above.

[0090] In other embodiments, the linkers may comprise acid cleavable groups, which are groups that are cleaved under acidic conditions. In some embodiments, acid cleavable groups are cleaved in an acidic environment with a pH of about 6.5 or lower (e.g., about 6.0, 5.5, 5.0, or lower), or by agents, such as enzymes that can act as a general acid. In a cell, specific low pH organelles, such as endosomes and lysosomes, can provide a cleaving environment for acid cleavable groups. Examples of acid cleavable linking groups include, but are not limited to, hydrazones, esters, and esters of amino acids. Acid cleavable groups can have the general formula —C═NN—, C(O)O, or —OC(O). A specific embodiment is when the carbon attached to the oxygen of the ester (the alkoxy group) is an aryl group, substituted alkyl group, or tertiaryalkyl group such as dimethyl, pentyl or t-butyl. These candidates can be evaluated using methods analogous to those described above.

[0091] In other embodiments, the linkers may comprise ester-based cleavable groups, which are cleaved by enzymes, such as esterases and amidases in cells. Examples of ester-based cleavable groups include, but are not limited to, esters of alkylene, alkenylene and alkynylene groups. Ester cleavable groups have the general formula —C(O)O—, or —OC(O)—. These candidate linkers can be evaluated using methods analogous to those described above.

[0092] In further embodiments, the linkers may comprise peptide-based cleavable groups, which are cleaved by enzymes, such as peptidases and proteases in cells. Peptide-based cleavable groups are peptide bonds formed between amino acids to yield oligopeptides (e.g., dipeptides, tripeptides etc.) and polypeptides. Peptide-based cleavable groups do not include the amide group (—C(O)NH—). The amide group can be formed between any alkylene, alkenylene or alkynelene. A peptide bond is a special type of amide bond formed between amino acids to yield peptides and proteins. The peptide based cleavage group is generally limited to the peptide bond (i.e., the amide bond) formed between amino acids yielding peptides and proteins and does not include the entire amide functional group. Peptide-based cleavable linking groups have the general formula-NHCHRAC(O)NHCHRBC(O)—, where RA and RB are the R groups of the two adjacent amino acids. These candidates can be evaluated using methods analogous to those described above.

[0093] Other types of linkers suitable for attaching ligands to the sense or antisense strands in the RNAi constructs of the invention are known in the art and can include the linkers described in U.S. Pat. Nos. 7,723,509; 8,017,762; 8,828,956; 8,877,917; and 9,181,551, all of which are hereby incorporated by reference in their entireties.

[0094] In certain embodiments, the ligand covalently attached to the sense or antisense strand of the RNAi constructs of the invention comprises a GalNAc moiety, e.g, a multivalent GalNAc moiety. In some embodiments, the multivalent GalNAc moiety is a trivalent GalNAc moiety and is attached to the 3′ end of the sense strand. In other embodiments, the multivalent GalNAc moiety is a trivalent GalNAc moiety and is attached to the 5′ end of the sense strand. In yet other embodiments, the multivalent GalNAc moiety is a tetravalent GalNAc moiety and is attached to the 3′ end of the sense strand. In still other embodiments, the multivalent GalNAc moiety is a tetravalent GalNAc moiety and is attached to the 5′ end of the sense strand.

[0095] In some embodiments, the RNAi constructs of the invention may be delivered to a cell or tissue of interest by administering a vector that encodes and controls the intracellular expression of the RNAi construct. A “vector” (also referred to herein as an “expression vector) is a composition of matter which can be used to deliver a nucleic acid of interest to the interior of a cell. Numerous vectors are known in the art including, but not limited to, linear polynucleotides, polynucleotides associated with ionic or amphiphilic compounds, plasmids, and viruses. Thus, the term “vector” includes an autonomously replicating plasmid or a virus. Examples of viral vectors include, but are not limited to, adenoviral vectors, adeno-associated viral vectors, retroviral vectors, and the like. A vector can be replicated in a living cell, or it can be made synthetically.

[0096] Generally, a vector for expressing an RNAi construct of the invention will comprise one or more promoters operably linked to sequences encoding the RNAi construct. The phrase“operably linked” or “under transcriptional control” as used herein means that the promoter is in the correct location and orientation in relation to a polynucleotide sequence to control the initiation of transcription by RNA polymerase and expression of the polynucleotide sequence. A “promoter” refers to a sequence recognized by the synthetic machinery of the cell, or introduced synthetic machinery, required to initiate the specific transcription of a gene sequence. Suitable promoters include, but are not limited to, RNA pol I, pol II, HI or U6 RNA pol III, and viral promoters (e.g. human cytomegalovirus (CM V) immediate early gene promoter, the SV 40 early promoter, and the Rous sarcoma virus long terminal repeat). In some embodiments, a HI or U6RNA pol III promoter is preferred. The promoter can be a tissue-specific or inducible promoter. Of particular interest are liver-specific promoters, such as promoter sequences from human alpha!-antitrypsin gene, albumin gene, hemopexin gene, and hepatic lipase gene. Inducible promoters include promoters regulated by ecdysone, estrogen, progesterone, tetracycline, and isopropyl-PD1-thiogalactopyranoside (IPTG).

[0097] In some embodiments in which the RNAi construct comprises a siRNA, the two separate strands (sense and antisense strand) can be expressed from a single vector or two separate vectors. For example, in one embodiment, the sequence encoding the sense strand is operably linked to a promoter on a first vector and the sequence encoding the antisense strand is operably linked to a promoter on a second vector. In such an embodiment, the first and second vectors are co-introduced, e.g., by infection or transfection, into a target cell, such that the sense and antisense strands, once transcribed, will hybridize intracellularly to form the siRNA molecule. In another embodiment, the sense and antisense strands are transcribed from two separate promoters located in a single vector. In some such embodiments, the sequence encoding the sense strand is operably linked to a first promoter and the sequence encoding the antisense strand is operably linked to a second promoter, wherein the first and second promoters are located in a single vector. In one embodiment, the vector comprises a first promoter operably linked to a sequence encoding the siRNA molecule, and a second promoter operably linked to the same sequence in the opposite direction, such that transcription of the sequence from the first promoter results in the synthesis of the sense strand of the siRNA molecule and transcription of the sequence from the second promoter results in synthesis of the antisense strand of the siRNA molecule.

[0098] In other embodiments in which the RNAi construct comprises a shRNA, a sequence encoding the single, at least partially self-complementary RNA molecule is operably linked to a promoter to produce a single transcript. In some embodiments, the sequence encoding the shRNA comprises an inverted repeat joined by a linker polynucleotide sequence to produce the stem and loop structure of the shRNA following transcription.

[0099] In some embodiments, the vector encoding an RNAi construct of the invention is a viral vector. Various viral vector systems that are suitable to express the RNAi constructs described herein include, but are not limited to, adenoviral vectors, retroviral vectors (e.g., lentiviral vectors, maloney murine leukemia virus), adeno-associated viral vectors; herpes simplex viral vectors; SV 40 vectors; polyoma viral vectors; papilloma viral vectors; picornaviral vectors; and pox viral vectors (e.g. vaccinia virus). In certain embodiments, the viral vector is a retroviral vector (e.g. lentiviral vector).

[0100] Various vectors suitable for use in the invention, methods for inserting nucleic acid sequences encoding siRNA or shRNA molecules into vectors, and methods of delivering the vectors to the cells of interest are within the skill of those in the art. See, e.g., Dornburg, Gene Therap., Vol. 2:301-310, 1995; Eglitis, Biotechniques, Vol. 6:608-614, 1988; Miller, HumGene Therap., Vol. 1:5-14, 1990; Anderson, Nature, Vol. 392:25-30, 1998; Rubinson D A et al., Nat. Genet., Vol. 33:401-406, 2003; Brummelkamp et al., Science, Vol. 296:550-553, 2002; Brummelkamp et al., Cancer Cell, Vol. 2:243-247, 2002; Lee et al., Nat Biotechnol, Vol. 20:500-505, 2002; Miyagishi et al., Nat Biotechnol, Vol. 20:497-500, 2002; Paddison et al., Genes Dev, Vol. 16:948-958, 2002; Paul et al., Nat Biotechnol, Vol. 20:505-508, 2002; Sui et al., Proc Natl Acad Sci USA, Vol. 99: 5515-5520, 2002; and Y u et al., Proc Natl Acad Sci USA, Vol. 99:6047-6052, 2002, all of which are hereby incorporated by reference in their entireties.

[0101] The present invention also includes pharmaceutical compositions and formulations comprising the RNAi constructs described herein and pharmaceutically acceptable carriers, excipients, or diluents. Such compositions and formulations are useful for reducing expression of PNPLA3 in a subject in need thereof Where clinical applications are contemplated, pharmaceutical compositions and formulations will be prepared in a form appropriate for the intended application. Generally, this will entail preparing compositions that are essentially free of pyrogens, as well as other impurities that could be harmful to humans or animals.

[0102] The phrases “pharmaceutically acceptable” or “pharmacologically acceptable” refer to molecular entities and compositions that do not produce adverse, allergic, or other untoward reactions when administered to an animal or a human. As used herein, “pharmaceutically acceptable carrier, excipient, or diluent” includes solvents, buffers, solutions, dispersion media, coatings, antibacterial and antifungal agents, isotonic and absorption delaying agents and the like acceptable for use in formulating pharmaceuticals, such as pharmaceuticals suitable for administration to humans. The use of such media and agents for pharmaceutically active substances is well known in the art. Except insofar as any conventional media or agent is incompatible with the RNAi constructs of the present invention, its use in therapeutic compositions is contemplated. Supplementary active ingredients also can be incorporated into the compositions, provided they do not inactivate the vectors or RNAi constructs of the compositions.

[0103] Compositions and methods for the formulation of pharmaceutical compositions depend on a number of criteria, including, but not limited to, route of administration, type and extent of disease or disorder to be treated, or dose to be administered. In some embodiments, the pharmaceutical compositions are formulated based on the intended route of delivery. For instance, in certain embodiments, the pharmaceutical compositions are formulated for parenteral delivery. Parenteral forms of delivery include intravenous, intraarterial, subcutaneous, intrathecal, intraperitoneal or intramuscular injection or infusion. In one embodiment, the pharmaceutical composition is formulated for intravenous delivery. In such an embodiment, the pharmaceutical composition may include a lipid-based delivery vehicle. In another embodiment, the pharmaceutical composition is formulated for subcutaneous delivery. In such an embodiment, the pharmaceutical composition may include a targeting ligand (e.g. GalNAc containing ligands described herein).

[0104] In some embodiments, the pharmaceutical compositions comprise an effective amount of an RNAi construct described herein. An “effective amount” is an amount sufficient to produce a beneficial or desired clinical result. In some embodiments, an effective amount is an amount sufficient to reduce PNPLA3 expression in hepatocytes of a subject. In some embodiments, an effective amount may be an amount sufficient to only partially reduce PNPLA3 expression, for example, to a level comparable to expression of the wild-type PNPLA3 allele in human heterozygotes. Human heterozygous carriers of loss of function PNPLA3 variant alleles were reported to have lower serum levels of non-HDL cholesterol and a lower risk of coronary artery disease and myocardial infarction as compared to non-carriers (Nioi et al., New England Journal of Medicine, Vol. 374(22):2131-2141, 2016). Thus, without being bound by theory, it is believed that partial reduction of PNPLA3 expression may be sufficient to achieve the beneficial reduction of serum non-HDL cholesterol and reduction of risk of coronary artery disease and myocardial infarction.

[0105] An effective amount of an RNAi construct of the invention may be from about 0.01 mg/kg body weight to about 100 mg/kg body weight, about 0.05 mg/kg body weight to about 75 mg/kg body weight, about 0.1 mg/kg body weight to about 50 mg/kg body weight, about 1 mg/kg to about 30 mg/kg body weight, about 2.5 mg/kg of body weight to about 20 mg/kg bodyweight, or about 5 mg/kg body weight to about 15 mg/kg body weight. In certain embodiments, a single effective dose of an RNAi construct of the invention may be about 0.1 mg/kg, about 0.5 mg/kg, about 1 mg/kg, about 2 mg/kg, about 3 mg/kg, about 4 mg/kg, about 5 mg/kg, about 6 mg/kg, about 7 mg/kg, about 8 mg/kg, about 9 mg/kg, or about 10 mg/kg. The pharmaceutical composition comprising an effective amount of RNAi construct can be administered weekly, biweekly, monthly, quarterly, or biannually. The precise determination of what would be considered an effective amount and frequency of administration may be based on several factors, including a patient's size, age, and general condition, type of disorder to be treated (e.g. myocardial infarction, heart failure, coronary artery disease, hypercholesterolemia), particular RNAi construct employed, and route of administration. Estimates of effective dosages and in vivo half-lives for any particular RNAi construct of the invention can be ascertained using conventional methods and/or testing in appropriate animal models.

[0106] Administration of the pharmaceutical compositions of the present invention may be via any common route so long as the target tissue is available via that route. Such routes include, but are not limited to, parenteral (e.g., subcutaneous, intramuscular, intraperitoneal or intravenous), oral, nasal, buccal, intradermal, transdermal, and sublingual routes, or by direct injection into liver tissue or delivery through the hepatic portal vein. In some embodiments, the pharmaceutical composition is administered parenterally. For instance, in certain embodiments, the pharmaceutical composition is administered intravenously. In other embodiments, the pharmaceutical composition is administered subcutaneously.

[0107] Colloidal dispersion systems, such as macromolecule complexes, nanocapsules, microspheres, beads, and lipid-based systems, including oil-in-water emulsions, micelles, mixed micelles, and liposomes, may be used as delivery vehicles for the RNAi constructs of the invention or vectors encoding such constructs. Commercially available fat emulsions that are suitable for delivering the nucleic acids of the invention include Intralipid®, Liposyn®, Liposyn® II, Liposyn® III, Nutrilipid, and other similar lipid emulsions. A preferred colloidal system for use as a delivery vehicle in vivo is a liposome (i.e., an artificial membrane vesicle). The RNAi constructs of the invention may be encapsulated within liposomes or may form complexes thereto, in particular to cationic liposomes. Alternatively, RNAi constructs of the invention may be complexed to lipids, in particular to cationic lipids. Suitable lipids and liposomes include neutral (e.g., dioleoylphosphatidyl ethanolamine (DOPE), dimyristoylphosphatidyl choline (DMPC), and dipalmitoyl phosphatidylcholine (DPPC)), distearolyphosphatidyl choline), negative (e.g., dimyristoylphosphatidyl glycerol (DMPG)), andcationic (e.g., dioleoyltetramethylaminopropyl (DOTAP) and dioleoylphosphatidyl ethanolamine (DOTMA)). The preparation and use of such colloidal dispersion systems is well known in the art. Exemplary formulations are also disclosed in U.S. Pat. Nos. 5,981,505; 6,217,900; 6,383,512; 5,783,565; 7,202,227; 6,379,965; 6,127,170; 5,837,533; 6,747,014; and W003/093449.

[0108] In some embodiments, the RNAi constructs of the invention are fully encapsulated in a lipid formulation, e.g., to form a SPLP, pSPLP, SNALP, or other nucleic acid-lipid particle. As used herein, the term “SNALP” refers to a stable nucleic acid-lipid particle, including SPLP. As used herein, the term “SPLP” refers to a nucleic acid-lipid particle comprising plasmid DNA encapsulated within a lipid vesicle. SNALPs and SPLPs typically contain a cationic lipid, a noncationic lipid, and a lipid that prevents aggregation of the particle (e.g., a PEG-lipid conjugate). SNALPs and SPLPs are exceptionally useful for systemic applications, as they exhibit extended circulation lifetimes following intravenous injection and accumulate at distal sites (e.g., sites physically separated from the administration site). SPLPs include “pSPLP,” which include an encapsulated condensing agent-nucleic acid complex as set forth in PCT Publication No. WO00/03683. The nucleic acid-lipid particles typically have a mean diameter of about 50 nm to about 150 nm, about 60 nm to about 130 nm, about 70 nm to about 110 nm, or about 70 nm to about 90 nm, and are substantially nontoxic. In addition, the nucleic acids when present in the nucleic acid-lipid particles are resistant in aqueous solution to degradation with a nuclease. Nucleic acid-lipid particles and their method of preparation are disclosed in, e.g., U.S. Pat. Nos. 5,976,567; 5,981,501; 6,534,484; 6,586,410; 6,815,432; and PCT Publication No. WO96/40964.

[0109] The pharmaceutical compositions suitable for injectable use include, for example, sterile aqueous solutions or dispersions and sterile powders for the extemporaneous preparation of sterile injectable solutions or dispersions. Generally, these preparations are sterile and fluid to the extent that easy injectability exists. Preparations should be stable under the conditions of manufacture and storage and should be preserved against the contaminating action of microorganisms, such as bacteria and fungi. Appropriate solvents or dispersion media may contain, for example, water, ethanol, polyol (for example, glycerol, propylene glycol, and liquid polyethylene glycol, and the like), suitable mixtures thereof, and vegetable oils. The proper fluidity can be maintained, for example, by the use of a coating, such as lecithin, by the maintenance of the required particle size in the case of dispersion and by the use of surfactants. The prevention of the action of microorganisms can be brought about by various antibacterial an antifungal agents, for example, parabens, chlorobutanol, phenol, sorbic acid, thimerosal, and the like. In many cases, it will be preferable to include isotonic agents, for example, sugars or sodium chloride. Prolonged absorption of the injectable compositions can be brought about by the use in the compositions of agents delaying absorption, for example, aluminum monostearate and gelatin.

[0110] Sterile injectable solutions may be prepared by incorporating the active compounds in an appropriate amount into a solvent along with any other ingredients (for example as enumerated above) as desired, followed by filtered sterilization. Generally, dispersions are prepared by incorporating the various sterilized active ingredients into a sterile vehicle which contains the basic dispersion medium and the desired other ingredients, e.g., as enumerated above. In the case of sterile powders for the preparation of sterile injectable solutions, the preferred methods of preparation include vacuum-drying and freeze-drying techniques which yield a powder of the active ingredient(s) plus any additional desired ingredient from a previously sterile-filtered solution thereof

[0111] The compositions of the present invention generally may be formulated in a neutral or salt form. Pharmaceutically-acceptable salts include, for example, acid addition salts (formed with free amino groups) derived from inorganic acids (e.g., hydrochloric or phosphoric acids), or from organic acids (e.g., acetic, oxalic, tartaric, mandelic, and the like). Salts formed with the free carboxyl groups can also be derived from inorganic bases (e.g., sodium, potassium, ammonium, calcium, or ferric hydroxides) or from organic bases (e.g., isopropylamine, trimethylamine, histidine, procaine and the like).

[0112] For parenteral administration in an aqueous solution, for example, the solution generally is suitably buffered and the liquid diluent first rendered isotonic for example with sufficient saline or glucose. Such aqueous solutions may be used, for example, for intravenous, intramuscular, subcutaneous and intraperitoneal administration. Preferably, sterile aqueous media are employed as is known to those of skill in the art, particularly in light of the present disclosure. By way of illustration, a single dose may be dissolved in 1 ml of isotonic NaCl solution and either added to 1000 ml of hypodermoclysis fluid or injected at the proposed site of infusion, (see for example, “Remington's Pharmaceutical Sciences” 15th Edition, pages 1035-1038 and 1570-1580). For human administration, preparations should meet sterility, pyrogenicity, general safety and purity standards as required by FDA standards. In certain embodiments, a pharmaceutical composition of the invention comprises or consists of a sterile saline solution and an RNAi construct described herein. In other embodiments, a pharmaceutical composition of the invention comprises or consists of an RNAi construct described herein and sterile water (e.g. water for injection, WFI). In still other embodiments, a pharmaceutical composition of the invention comprises or consists of an RNAi construct described herein and phosphate-buffered saline (PBS).

[0113] In some embodiments, the pharmaceutical compositions of the invention are packaged with or stored within a device for administration. Devices for injectable formulations include, but are not limited to, injection ports, pre-filled syringes, auto injectors, injection pumps, on-body injectors, and injection pens. Devices for aerosolized or powder formulations include, but are not limited to, inhalers, insufflators, aspirators, and the like. Thus, the present invention includes administration devices comprising a pharmaceutical composition of the invention for treating or preventing one or more of the disorders described herein.

### Methods for Inhibiting PNPLA3 Expression

[0114] The present invention also provides methods of inhibiting expression of a PNPLA3 gene in a cell. The methods include contacting a cell with an RNAi agent, e.g., double stranded RNAi agent, in an amount effective to inhibit expression of PNPLA3 in the cell, thereby inhibiting expression of PNPLA3 in the cell. Contacting of a cell with an RNAi agent, e.g., a double stranded RNAi agent, may be done in vitro or in vivo. Contacting a cell in vivo with the RNAi agent includes contacting a cell or group of cells within a subject, e.g., a human subject, with the RNAi agent. Combinations of in vitro and in vivo methods of contacting a cell are also possible.

[0115] The present invention provides methods for reducing or inhibiting expression of PNPLA3 in a subject in need thereof as well as methods of treating or preventing conditions, diseases, or disorders associated with PNPLA3 expression or activity. A “condition, disease, or disorder associated with PNPLA3 expression” refers to conditions, diseases, or disorders in which PNPLA3 expression levels are altered or where elevated expression levels of PNPLA3 are associated with an increased risk of developing the condition, disease or disorder.

[0116] Contacting a cell may be direct or indirect, as discussed above. Furthermore, contacting a cell may be accomplished via a targeting ligand, including any ligand described herein or known in the art. In preferred embodiments, the targeting ligand is a carbohydrate moiety, e.g., a GalNAc3 ligand, or any other ligand that directs the RNAi agent to a site of interest.

[0117] In one embodiment, contacting a cell with an RNAi includes “introducing” or “delivering the RNAi into the cell” by facilitating or effecting uptake or absorption into the cell. Absorption or uptake of an RNAi can occur through unaided diffusive or active cellular processes, or by auxiliary agents or devices. Introducing an RNAi into a cell may be in vitro and/or in vivo. For example, for in vivo introduction, RNAi can be injected into a tissue site or administered systemically. In vitro introduction into a cell includes methods known in the art such as electroporation and lipofection. Further approaches are described herein below and/or are known in the art.

[0118] The term “inhibiting,” as used herein, is used interchangeably with “reducing,” “silencing,” “downregulating”, “suppressing”, and other similar terms, and includes any level of inhibition.

[0119] The phrase “inhibiting expression of a PNPLA3” is intended to refer to inhibition of expression of any PNPLA3 gene (such as, e.g., a mouse PNPLA3 gene, a rat PNPLA3 gene, a monkey PNPLA3 gene, or a human PNPLA3 gene) as well as variants or mutants of a PNPLA3 gene. Thus, the PNPLA3 gene may be a wild-type PNPLA3 gene, a mutant PNPLA3 gene (such as a mutant PNPLA3 gene giving rise to amyloid deposition), or a transgenic PNPLA3 gene in the context of a genetically manipulated cell, group of cells, or organism.

[0120] “Inhibiting expression of a PNPLA3 gene” includes any level of inhibition of a PNPLA3 gene, e.g., at least partial suppression of the expression of a PNPLA3 gene. The expression of the PNPLA3 gene may be assessed based on the level, or the change in the level, of any variable associated with PNPLA3 gene expression, e.g., PNPLA3 mRNA level, PNPLA3 protein level, or the number or extent of amyloid deposits. This level may be assessed in an individual cell or in a group of cells, including, for example, a sample derived from a subject.

[0121] Inhibition may be assessed by a decrease in an absolute or relative level of one or more variables that are associated with PNPLA3 expression compared with a control level. The control level may be any type of control level that is utilized in the art, e.g., a pre-dose baseline level, or a level determined from a similar subject, cell, or sample that is untreated or treated with a control (such as, e.g., buffer only control or inactive agent control). In some embodiments of the methods of the invention, expression of a PNPLA3 gene is inhibited by at least about 5%, at least about 10%, at least about 15%, at least about 20%, at least about 25%, at least about 30%, at least about 35%, at least about 40%, at least about 45%, at least about 50%, at least about 55%, at least about 60%, at least about 65%, at least about 70%, at least about 75%, at least about 80%, at least about 85%, at least about 90%, at least about 91%, at least about 92%, at least about 93%, at least about 94%, at least about 95%, at least about 96%, at least about 97%, at least about 98%, or at least about 99%.

[0122] Inhibition of the expression of a PNPLA3 gene may be manifested by a reduction of the amount of mRNA expressed by a first cell or group of cells (such cells may be present, for example, in a sample derived from a subject) in which a PNPLA3 gene is transcribed and which has or have been treated (e.g., by contacting the cell or cells with an RNAi agent of the invention, or by administering an RNAi agent of the invention to a subject in which the cells are or were present) such that the expression of a PNPLA3 gene is inhibited, as compared to a second cell or group of cells substantially identical to the first cell or group of cells but which has not or have not been so treated (control cell(s)). In preferred embodiments, the inhibition is assessed by expressing the level of mRNA in treated cells as a percentage of the level of mRNA in control cells, using the following formula:

(mRNA in control cells)−(mRNA in treated cells)/(mRNA in control cells)·100%

[0123] Alternatively, inhibition of the expression of a PNPLA3 gene may be assessed in terms of a reduction of a parameter that is functionally linked to PNPLA3 gene expression, e.g., PNPLA3 protein expression or Hedgehog pathway protein activities. PNPLA3 gene silencing may be determined in any cell expressing PNPLA3, either constitutively or by genomic engineering, and by any assay known in the art.

[0124] Inhibition of the expression of a PNPLA3 protein may be manifested by a reduction in the level of the PNPLA3 protein that is expressed by a cell or group of cells (e.g., the level of protein expressed in a sample derived from a subject). As explained above, for the assessment of mRNA suppression, the inhibition of protein expression levels in a treated cell or group of cells may similarly be expressed as a percentage of the level of protein in a control cell or group of cells.

[0125] A control cell or group of cells that may be used to assess the inhibition of the expression of a PNPLA3 gene includes a cell or group of cells that has not yet been contacted with an RNAi agent of the invention. For example, the control cell or group of cells may be derived from an individual subject (e.g., a human or animal subject) prior to treatment of the subject with an RNAi agent.

[0126] The level of PNPLA3 mRNA that is expressed by a cell or group of cells, or the level of circulating PNPLA3 mRNA, may be determined using any method known in the art for assessing mRNA expression. In one embodiment, the level of expression of PNPLA3 in a sample is determined by detecting a transcribed polynucleotide, or portion thereof, e.g., mRNA of the PNPLA3 gene. RNA may be extracted from cells using RNA extraction techniques including, for example, using acid phenol/guanidine isothiocyanate extraction (RNA zol B; Biogenesis), RNeasy RNA preparation kits (Qiagen) or PAX gene (PreAnalytix, Switzerland). Typical assay formats utilizing ribonucleic acid hybridization include nuclear run-on assays, RT-PCR, RNase protection assays (Melton et al., Nuc. Acids Res. 12:7035), Northern blotting, in situ hybridization, and microarray analysis. Circulating PNPLA3 mRNA may be detected using methods the described in PCT/US2012/043584, the entire contents of which are hereby incorporated herein by reference.

[0127] In one embodiment, the level of expression of PNPLA3 is determined using a nucleic acid probe. The term “probe”, as used herein, refers to any molecule that is capable of selectively binding to a specific PNPLA3. Probes can be synthesized by one of skill in the art, or derived from appropriate biological preparations. Probes may be specifically designed to be labeled. Examples of molecules that can be utilized as probes include, but are not limited to, RNA, DNA, proteins, antibodies, and organic molecules.

[0128] Isolated mRNA can be used in hybridization or amplification assays that include, but are not limited to, Southern or Northern analyses, polymerase chain reaction (PCR) analyses and probe arrays. One method for the determination of mRNA levels involves contacting the isolated mRNA with a nucleic acid molecule (probe) that can hybridize to PNPLA3 mRNA. In one embodiment, the mRNA is immobilized on a solid surface and contacted with a probe, for example by running the isolated mRNA on an agarose gel and transferring the mRNA from the gel to a membrane, such as nitrocellulose. In an alternative embodiment, the probe(s) are immobilized on a solid surface and the mRNA is contacted with the probe(s), for example, in an Affymetrix gene chip array. A skilled artisan can readily adapt known mRNA detection methods for use in determining the level of PNPLA3 mRNA.

[0129] An alternative method for determining the level of expression of PNPLA3 in a sample involves the process of nucleic acid amplification and/or reverse transcriptase (to prepare cDNA) of for example mRNA in the sample, e.g., by RT-PCR (the experimental embodiment set forth in Mullis, 1987, U.S. Pat. No. 4,683,202), ligase chain reaction (Barany (1991) Proc. Natl. Acad. Sci. USA 88:189-193), self sustained sequence replication (Guatelli et al. (1990) Proc. Natl. Acad. Sci. USA 87:1874-1878), transcriptional amplification system (Kwoh et al. (1989) Proc. Natl. Acad. Sci. USA 86:1173-1177), Q-Beta Replicase (Lizardi et al. (1988) Bio/Technology 6:1197), rolling circle replication (Lizardi et al., U.S. Pat. No. 5,854,033) or any other nucleic acid amplification method, followed by the detection of the amplified molecules using techniques well known to those of skill in the art. These detection schemes are especially useful for the detection of nucleic acid molecules if such molecules are present in very low numbers. In particular aspects of the invention, the level of expression of PNPLA3 is determined by quantitative fluorogenic RT-PCR {i.e., the TaqMan™ System). The expression levels of PNPLA3 mRNA may be monitored using a membrane blot (such as used in hybridization analysis such as Northern, Southern, dot, and the like), or microwells, sample tubes, gels, beads or fibers (or any solid support comprising bound nucleic acids). See U.S. Pat. Nos. 5,770,722, 5,874,219, 5,744,305, 5,677,195 and 5,445,934, which are incorporated herein by reference. The determination of PNPLA3 expression level may also comprise using nucleic acid probes in solution.

[0130] In preferred embodiments, the level of mRNA expression is assessed using branched DNA (bDNA) assays or real time PCR (qPCR). The use of these methods is described and exemplified in the Examples presented herein.

[0131] The level of PNPLA3 protein expression may be determined using any method known in the art for the measurement of protein levels. Such methods include, for example, electrophoresis, capillary electrophoresis, high performance liquid chromatography (HPLC), thin layer chromatography (TLC), hyperdiffusion chromatography, fluid or gel precipitin reactions, absorption spectroscopy, a colorimetric assays, spectrophotometric assays, flow cytometry, immunodiffusion (single or double), Immunoelectrophoresis, Western blotting, radioimmunoassay (RIA), enzyme-linked immunosorbent assays (ELISAs), immunofluorescent assays, electrochemiluminescence assays, and the like.

[0132] In some embodiments, the efficacy of the methods of the invention can be monitored by detecting or monitoring a reduction in a symptom of a PNPLA3 disease, such as reduction in edema swelling of the extremities, face, larynx, upper respiratory tract, abdomen, trunk, and genitals, prodrome; laryngeal swelling; nonpruritic rash; nausea; vomiting; or abdominal pain. These symptoms may be assessed in vitro or in vivo using any method known in the art.

[0133] In some embodiments of the methods of the invention, the RNAi agent is administered to a subject such that the RNAi agent is delivered to a specific site within the subject. The inhibition of expression of PNPLA3 may be assessed using measurements of the level or change in the level of PNPLA3 mRNA or PNPLA3 protein in a sample derived from fluid or tissue from the specific site within the subject. In preferred embodiments, the site is selected from the group consisting of liver, choroid plexus, retina, and pancreas. The site may also be a subsection or subgroup of cells from any one of the aforementioned sites. The site may also include cells that express a particular type of receptor.

### Methods of Treating or Preventing PNPLA3-Associated Diseases

[0134] The present invention provides therapeutic and prophylactic methods which include administering to a subject with a PNPLA3-associated disease, disorder, and/or condition, or prone to developing, a PNPLA3-associated disease, disorder, and/or condition, compositions comprising an RNAi agent, or pharmaceutical compositions comprising an RNAi agent, or vectors comprising an RNAi of the invention. Non-limiting examples of PNPLA3-associated diseases include, for example, fatty liver (steatosis), nonalcoholic steatohepatitis (NASH), cirrhosis of the liver, accumulation of fat in the liver, inflammation of the liver, hepatocellular necrosis, liver fibrosis, obesity, or nonalcoholic fatty liver disease (NAFLD). In one embodiment, the PNPLA3-associated disease is NAFLD. In another embodiment, the PNPLA3-associated disease is NASH. In another embodiment, the PNPLA3-associated disease is fatty liver (steatosis). In another embodiment, the PNPLA3-associated disease is insulin resistance. In another embodiment, the PNPLA3-associated disease is not insulin resistance.

[0135] In certain embodiments, the present invention provides a method for reducing the expression of PNPLA3 in a patient in need thereof comprising administering to the patient any of the RNAi constructs described herein. The term “patient,” as used herein, refers to a mammal, including humans, and can be used interchangeably with the term “subject.” Preferably, the expression level of PNPLA3 in hepatocytes in the patient is reduced following administration of the RNAi construct as compared to the PNPLA3 expression level in a patient not receiving the RNAi construct.

[0136] The methods of the invention are useful for treating a subject having a PNPLA3-associated disease, e.g., a subject that would benefit from reduction in PNPLA3 gene expression and/or PNPLA3 protein production. In one aspect, the present invention provides methods of reducing the level of Patatin-Like Phospholipase Domain Containing 3 (PNPLA3) gene expression in a subject having nonalcoholic fatty liver disease (NAFLD). In another aspect, the present invention provides methods of reducing the level of PNPLA3 protein in a subject with NAFLD. The present invention also provides methods of reducing the level of activity of the hedgehog pathway in a subject with NAFLD.

[0137] In another aspect, the present invention provides methods of treating a subject having an NAFLD. In one aspect, the present invention provides methods of treating a subject having an PNPLA3-associated disease, e.g., fatty liver (steatosis), nonalcoholic steatohepatitis (NASH), cirrhosis of the liver, accumulation of fat in the liver, inflammation of the liver, hepatocellular necrosis, liver fibrosis, obesity, or nonalcoholic fatty liver disease (NAFLD). The treatment methods (and uses) of the invention include administering to the subject, e.g., a human, a therapeutically effective amount of an RNAi agent of the invention targeting a PNPLA3 gene or a pharmaceutical composition comprising an RNAi agent of the invention targeting a PNPLA3 gene or a vector of the invention comprising an RNAi agent targeting an PNPLA3 gene.

[0138] In one aspect, the invention provides methods of preventing at least one symptom in a subject having NAFLD, e.g., the presence of elevated hedgehog signaling pathways, fatigue, weakness, weight loss, loss of appetite, nausea, abdominal pain, spider-like blood vessels, yellowing of the skin and eyes (jaundice), itching, fluid build up and swelling of the legs (edema), abdomen swelling (ascites), and mental confusion. The methods include administering to the subject a therapeutically effective amount of the RNAi agent, e.g. dsRNA, pharmaceutical compositions, or vectors of the invention, thereby preventing at least one symptom in the subject having a disorder that would benefit from reduction in PNPLA3 gene expression.

[0139] In another aspect, the present invention provides uses of a therapeutically effective amount of an RNAi agent of the invention for treating a subject, e.g., a subject that would benefit from a reduction and/or inhibition of PNPLA3 gene expression. In a further aspect, the present invention provides uses of an RNAi agent, e.g., a dsRNA, of the invention targeting an PNPLA3 gene or pharmaceutical composition comprising an RNAi agent targeting an PNPLA3 gene in the manufacture of a medicament for treating a subject, e.g., a subject that would benefit from a reduction and/or inhibition of PNPLA3 gene expression and/or PNPLA3 protein production, such as a subject having a disorder that would benefit from reduction in PNPLA3 gene expression, e.g., a PNPLA3-associated disease.

[0140] In another aspect, the invention provides uses of an RNAi, e.g., a dsRNA, of the invention for preventing at least one symptom in a subject suffering from a disorder that would benefit from a reduction and/or inhibition of PNPLA3 gene expression and/or PNPLA3 protein production.

[0141] In a further aspect, the present invention provides uses of an RNAi agent of the invention in the manufacture of a medicament for preventing at least one symptom in a subject suffering from a disorder that would benefit from a reduction and/or inhibition of PNPLA3 gene expression and/or PNPLA3 protein production, such as a PNPLA3-associated disease.

[0142] In one embodiment, an RNAi agent targeting PNPLA3 is administered to a subject having a PNPLA3-associated disease, e.g., nonalcoholic fatty liver disease (NAFLD), such that the expression of a PNPLA3 gene, e.g., in a cell, tissue, blood or other tissue or fluid of the subject are reduced by at least about 10%, 11%, 12%, 13%, 14%, 15%, 16%, 17%, 18%, 19%, 20%, 21%, 22%, 23%, 24%, 25%, 26%, 27%, 28%, 29%, 30%, 31%, 32%, 33%, 34%, 35%, 36%, 37%, 38%, 39%, 40%, 41%, 42%, 43%, 44%, 45%, 46%, 47%, 48%, 49%, 50%, 51%, 52%, 53%, 54%, 55%, 56%, 57%, 58%, 59%, 60%, 61%, 62%, 62%, 64%, 65%, 66%, 67%, 68%, 69%, 70%, 71%, 72%, 73%, 74%, 75%, 76%, 77%, 78%, 79%, 80%, 81%, 82%, 83%, 84%, 85%, 86%, 87%, 88%, 89%, 90%, 91%, 92%, 93%, 94%, 95%, 96%, 97%, 98%, or at least about 99% or more when the dsRNA agent is administered to the subject.

[0143] The methods and uses of the invention include administering a composition described herein such that expression of the target PNPLA3 gene is decreased, such as for about 1, 2, 3, 4 5, 6, 7, 8, 12, 16, 18, 24, 28, 32, 36, 40, 44, 48, 52, 56, 60, 64, 68, 72, 76, or about 80 hours. In one embodiment, expression of the target PNPLA3 gene is decreased for an extended duration, e.g., at least about two, three, four, five, six, seven days or more, e.g., about one week, two weeks, three weeks, or about four weeks or longer.

[0144] Administration of the dsRNA according to the methods and uses of the invention may result in a reduction of the severity, signs, symptoms, and/or markers of such diseases or disorders in a patient with a PNPLA3-associated disease, e.g., nonalcoholic fatty liver disease (NAFLD). By “reduction” in this context is meant a statistically significant decrease in such level. The reduction can be, for example, at least about 5%, 10%, 15%, 20%, 25%, 30%, 35%, 40%, 45%, 50%, 55%, 60%, 65%, 70%, 75%, 80%, 85%, 90%, 95%, or about 100%. Efficacy of treatment or prevention of disease can be assessed, for example by measuring disease progression, disease remission, symptom severity, reduction in pain, quality of life, dose of a medication required to sustain a treatment effect, level of a disease marker or any other measurable parameter appropriate for a given disease being treated or targeted for prevention. It is well within the ability of one skilled in the art to monitor efficacy of treatment or prevention by measuring any one of such parameters, or any combination of parameters. For example, efficacy of treatment of NAFLD may be assessed, for example, by periodic monitoring of NAFLD symptoms, liver fat levels, or expression of downstream genes. Comparison of the later readings with the initial readings provide a physician an indication of whether the treatment is effective. It is well within the ability of one skilled in the art to monitor efficacy of treatment or prevention by measuring any one of such parameters, or any combination of parameters. In connection with the administration of an RNAi targeting PNPLA3 or pharmaceutical composition thereof, “effective against” an PNPLA3-associated disease indicates that administration in a clinically appropriate manner results in a beneficial effect for at least a statistically significant fraction of patients, such as improvement of symptoms, a cure, a reduction in disease, extension of life, improvement in quality of life, or other effect generally recognized as positive by medical doctors familiar with treating NAFLD and/or an PNPLA3-associated disease and the related causes.

[0145] A treatment or preventive effect is evident when there is a statistically significant improvement in one or more parameters of disease status, or by a failure to worsen or to develop symptoms where they would otherwise be anticipated. As an example, a favorable change of at least 10% in a measurable parameter of disease, and preferably at least 20%, 30%, 40%, 50% or more can be indicative of effective treatment. Efficacy for a given RNAi drug or formulation of that drug can also be judged using an experimental animal model for the given disease as known in the art. When using an experimental animal model, efficacy of treatment is evidenced when a statistically significant reduction in a marker or symptom is observed.

[0146] Subjects can be administered a therapeutic amount of RNAi, such as about 0.01 mg/kg, 0.02 mg/kg, 0.03 mg/kg, 0.04 mg/kg, 0.05 mg/kg, 0.1 mg/kg, 0.15 mg/kg, 0.2 mg/kg, 0.25 mg/kg, 0.3 mg/kg, 0.35 mg/kg, 0.4 mg/kg, 0.45 mg/kg, 0.5 mg/kg, 0.55 mg/kg, 0.6 mg/kg, 0.65 mg/kg, 0.7 mg/kg, 0.75 mg/kg, 0.8 mg/kg, 0.85 mg/kg, 0.9 mg/kg, 0.95 mg/kg, 1.0 mg/kg, 1.1 mg/kg, 1.2 mg/kg, 1.3 mg/kg, 1.4 mg/kg, 1.5 mg/kg, 1.6 mg/kg, 1.7 mg/kg, 1.8 mg/kg, 1.9 mg/kg, 2.0 mg/kg, 2.1 mg/kg, 2.2 mg/kg, 2.3 mg/kg, 2.4 mg/kg, 2.5 mg/kg dsRNA, 2.6 mg/kg dsRNA, 2.7 mg/kg dsRNA, 2.8 mg/kg dsRNA, 2.9 mg/kg dsRNA, 3.0 mg/kg dsRNA, 3.1 mg/kg dsRNA, 3.2 mg/kg dsRNA, 3.3 mg/kg dsRNA, 3.4 mg/kg dsRNA, 3.5 mg/kg dsRNA, 3.6 mg/kg dsRNA, 3.7 mg/kg dsRNA, 3.8 mg/kg dsRNA, 3.9 mg/kg dsRNA, 4.0 mg/kg dsRNA, 4.1 mg/kg dsRNA, 4.2 mg/kg dsRNA, 4.3 mg/kg dsRNA, 4.4 mg/kg dsRNA, 4.5 mg/kg dsRNA, 4.6 mg/kg dsRNA, 4.7 mg/kg dsRNA, 4.8 mg/kg dsRNA, 4.9 mg/kg dsRNA, 5.0 mg/kg dsRNA, 5.1 mg/kg dsRNA, 5.2 mg/kg dsRNA, 5.3 mg/kg dsRNA, 5.4 mg/kg dsRNA, 5.5 mg/kg dsRNA, 5.6 mg/kg dsRNA, 5.7 mg/kg dsRNA, 5.8 mg/kg dsRNA, 5.9 mg/kg dsRNA, 6.0 mg/kg dsRNA, 6.1 mg/kg dsRNA, 6.2 mg/kg dsRNA, 6.3 mg/kg dsRNA, 6.4 mg/kg dsRNA, 6.5 mg/kg dsRNA, 6.6 mg/kg dsRNA, 6.7 mg/kg dsRNA, 6.8 mg/kg dsRNA, 6.9 mg/kg dsRNA, 7.0 mg/kg dsRNA, 7.1 mg/kg dsRNA, 7.2 mg/kg dsRNA, 7.3 mg/kg dsRNA, 7.4 mg/kg dsRNA, 7.5 mg/kg dsRNA, 7.6 mg/kg dsRNA, 7.7 mg/kg dsRNA, 7.8 mg/kg dsRNA, 7.9 mg/kg dsRNA, 8.0 mg/kg dsRNA, 8.1 mg/kg dsRNA, 8.2 mg/kg dsRNA, 8.3 mg/kg dsRNA, 8.4 mg/kg dsRNA, 8.5 mg/kg dsRNA, 8.6 mg/kg dsRNA, 8.7 mg/kg dsRNA, 8.8 mg/kg dsRNA, 8.9 mg/kg dsRNA, 9.0 mg/kg dsRNA, 9.1 mg/kg dsRNA, 9.2 mg/kg dsRNA, 9.3 mg/kg dsRNA, 9.4 mg/kg dsRNA, 9.5 mg/kg dsRNA, 9.6 mg/kg dsRNA, 9.7 mg/kg dsRNA, 9.8 mg/kg dsRNA, 9.9 mg/kg dsRNA, 9.0 mg/kg dsRNA, 10 mg/kg dsRNA, 15 mg/kg dsRNA, 20 mg/kg dsRNA, 25 mg/kg dsRNA, 30 mg/kg dsRNA, 35 mg/kg dsRNA, 40 mg/kg dsRNA, 45 mg/kg dsRNA, or about 50 mg/kg dsRNA. In one embodiment, subjects can be administered 0.5 mg/kg of the dsRNA. Values and ranges intermediate to the recited values are also intended to be part of this invention.

[0147] Administration of the RNAi can reduce the presence of PNPLA3 protein levels, e.g., in a cell, tissue, blood, urine or other compartment of the patient by at least about 5%, 6%, 7%, 8%, 9%, 10%, 11%, 12%, 13%, 14%, 15%, 16%, 17%, 18%, 19%, 20%, 21%, 22%, 23%, 24%, 25%, 26%, 27%, 28%, 29%, 30%, 31%, 32%, 33%, 34%, 35%, 36%, 37%, 38%, 39%, 40%, 41%, 42%, 43%, 44%, 45%, 46%, 47%, 48%, 49%, 50%, 51%, 52%, 53%, 54%, 55%, 56%, 57%, 58%, 59%, 60%, 61%, 62%, 63%, 64%, 65%, 66%, 67%, 68%, 69%, 70%, 71%, 72%, 73%, 74%, 75%, 76%, 77%, 78%, 79%, 80%, 81%, 82%, 83%, 84%, 85%, 86%, 87%, 88%, 89%, 90%, 91%, 92%, 93%, 94%, 95%, 96%, 97%, 98%, or at least about 99% or more.

[0148] Before administration of a full dose of the RNAi, patients can be administered a smaller dose, such as a 5% infusion, and monitored for adverse effects, such as an allergic reaction. In another example, the patient can be monitored for unwanted immunostimulatory effects, such as increased cytokine (e.g., TN F-alpha or INF-alpha) levels.

[0149] Owing to the inhibitory effects on PNPLA3 expression, a composition according to the invention or a pharmaceutical composition prepared therefrom can enhance the quality of life.

[0150] An RNAi of the invention may be administered in “naked” form, where the modified or unmodified RNAi agent is directly suspended in aqueous or suitable buffer solvent, as a “free RNAi.” A free RNAi is administered in the absence of a pharmaceutical composition. The free RNAi may be in a suitable buffer solution. The buffer solution may comprise acetate, citrate, prolamine, carbonate, or phosphate, or any combination thereof. In one embodiment, the buffer solution is phosphate buffered saline (PBS). The pH and osmolality of the buffer solution containing the RNAi can be adjusted such that it is suitable for administering to a subject.

[0151] Alternatively, an RNAi of the invention may be administered as a pharmaceutical composition, such as a dsRNA liposomal formulation.

[0152] Subjects that would benefit from a reduction and/or inhibition of PNPLA3 gene expression are those having nonalcoholic fatty liver disease (NAFLD) and/or an PNPLA3-associated disease or disorder as described herein.

[0153] Treatment of a subject that would benefit from a reduction and/or inhibition of PNPLA3 gene expression includes therapeutic and prophylactic treatment.

[0154] The invention further provides methods and uses of an RNAi agent or a pharmaceutical composition thereof for treating a subject that would benefit from reduction and/or inhibition of PNPLA3 gene expression, e.g., a subject having a PNPLA3-associated disease, in combination with other pharmaceuticals and/or other therapeutic methods, e.g., with known pharmaceuticals and/or known therapeutic methods, such as, for example, those which are currently employed for treating these disorders.

[0155] For example, in certain embodiments, an RNAi targeting a PNPLA3 gene is administered in combination with, e.g., an agent useful in treating an PNPLA3-associated disease as described elsewhere herein. For example, additional therapeutics and therapeutic methods suitable for treating a subject that would benefit from reduction in PNPLA3 expression, e.g., a subject having a PNPLA3-associated disease, include an RNAi agent targeting a different portion of the PNPLA3 gene, a therapeutic agent, and/or procedures for treating a PNPLA3-associated disease or a combination of any of the foregoing.

[0156] In certain embodiments, a first RNAi agent targeting a PNPLA3 gene is administered in combination with a second RNAi agent targeting a different portion of the PNPLA3 gene. For example, the first RNAi agent comprises a first sense strand and a first antisense strand forming a double stranded region, wherein substantially all of the nucleotides of said first sense strand and substantially all of the nucleotides of the first antisense strand are modified nucleotides, wherein said first sense strand is conjugated to a ligand attached at the 3′-terminus, and wherein the ligand is one or more GalNAc derivatives attached through a bivalent or trivalent branched linker; and the second RNAi agent comprises a second sense strand and a second antisense strand forming a double stranded region, wherein substantially all of the nucleotides of the second sense strand and substantially all of the nucleotides of the second antisense strand are modified nucleotides, wherein the second sense strand is conjugated to a ligand attached at the 3′-terminus, and wherein the ligand is one or more GalNAc derivatives attached through a bivalent or trivalent branched linker.

[0157] In one embodiment, all of the nucleotides of the first and second sense strand and/or all of the nucleotides of the first and second antisense strand comprise a modification.

[0158] In one embodiment, the at least one of the modified nucleotides is selected from the group consisting of a 3′-terminal deoxy-thymine (dT) nucleotide, a 2′-O-methyl modified nucleotide, a 2′-fluoro modified nucleotide, a 2′-deoxy-modified nucleotide, a locked nucleotide, an unlocked nucleotide, a conformationally restricted nucleotide, a constrained ethyl nucleotide, an abasic nucleotide, a 2′-amino-modified nucleotide, a 2′-O-allyl-modified nucleotide, 2′-C-alkyl-modified nucleotide, 2′-hydroxyl-modified nucleotide, a 2′-methoxyethyl modified nucleotide, a 2′-O-alkyl-modified nucleotide, a morpholino nucleotide, a phosphoramidate, a non-natural base comprising nucleotide, a tetrahydropyran modified nucleotide, a 1,5-anhydrohexitol modified nucleotide, a cyclohexenyl modified nucleotide, a nucleotide comprising a phosphorothioate group, a nucleotide comprising a methylphosphonate group, a nucleotide comprising a 5′-phosphate, and a nucleotide comprising a 5′-phosphate mimic.

[0159] In certain embodiments, a first RNAi agent targeting a PNPLA3 gene is administered in combination with a second RNAi agent targeting a gene that is different from the PNPLA3 gene. For example, the RNAi agent targeting the PNPLA3 gene may be administered in combination with an RNAi agent targeting the SCAP gene. The first RNAi agent targeting a PNPLA3 gene and the second RNAi agent targeting a gene different from the PNPLA3 gene, e.g., the SCAP gene, may be administered as parts of the same pharmaceutical composition. Alternatively, the first RNAi agent targeting a PNPLA3 gene and the second RNAi agent targeting a gene different from the PNPLA3 gene, e.g., the SCAP gene, may be administered as parts of different pharmaceutical compositions.

[0160] The RNAi agent and an additional therapeutic agent and/or treatment may be administered at the same time and/or in the same combination, e.g., parenterally, or the additional therapeutic agent can be administered as part of a separate composition or at separate times and/or by another method known in the art or described herein.

[0161] The present invention also provides methods of using an RNAi agent of the invention and/or a composition containing an RNAi agent of the invention to reduce and/or inhibit PNPLA3 expression in a cell. In other aspects, the present invention provides an RNAi of the invention and/or a composition comprising an RNAi of the invention for use in reducing and/or inhibiting PNPLA3 gene expression in a cell. In yet other aspects, use of an RNAi of the invention and/or a composition comprising an RNAi of the invention for the manufacture of a medicament for reducing and/or inhibiting PNPLA3 gene expression in a cell are provided. In still other aspects, the the present invention provides an RNAi of the invention and/or a composition comprising an RNAi of the invention for use in reducing and/or inhibiting PNPLA3 protein production in a cell. In yet other aspects, use of an RNAi of the invention and/or a composition comprising an RNAi of the invention for the manufacture of a medicament for reducing and/or inhibiting PNPLA3 protein production in a cell are provided. The methods and uses include contacting the cell with an RNAi, e.g., a dsRNA, of the invention and maintaining the cell for a time sufficient to obtain degradation of the mRNA transcript of an PNPLA3 gene, thereby inhibiting expression of the PNPLA3 gene or inhibiting PNPLA3 protein production in the cell.

[0162] Reduction in gene expression can be assessed by any methods known in the art. For example, a reduction in the expression of PNPLA3 may be determined by determining the mRNA expression level of PNPLA3 using methods routine to one of ordinary skill in the art, e.g., Northern blotting, qRT-PCR, by determining the protein level of PNPLA3 using methods routine to one of ordinary skill in the art, such as Western blotting, immunological techniques, flow cytometry methods, ELISA, and/or by determining a biological activity of PNPLA3.

[0163] In the methods and uses of the invention the cell may be contacted in vitro or in vivo, i.e., the cell may be within a subject.

[0164] A cell suitable for treatment using the methods of the invention may be any cell that expresses an PNPLA3 gene, e.g., a cell from a subject having NAFLD or a cell comprising an expression vector comprising a PNPLA3 gene or portion of a PNPLA3 gene. A cell suitable for use in the methods and uses of the invention may be a mammalian cell, e.g., a primate cell (such as a human cell or a non-human primate cell, e.g., a monkey cell or a chimpanzee cell), a non-primate cell (such as a cow cell, a pig cell, a camel cell, a llama cell, a horse cell, a goat cell, a rabbit cell, a sheep cell, a hamster, a guinea pig cell, a cat cell, a dog cell, a rat cell, a mouse cell, a lion cell, a tiger cell, a bear cell, or a buffalo cell), a bird cell (e.g., a duck cell or a goose cell), or a whale cell. In one embodiment, the cell is a human cell.

[0165] PNPLA3 gene expression may be inhibited in the cell by at least about 5%, 6%, 7%, 8%, 9%, 10%, 11%, 12%, 13%, 14%, 15%, 16%, 17%, 18%, 19%, 20%, 21%, 22%, 23%, 24%, 25%, 26%, 27%, 28%, 29%, 30%, 31%, 32%, 33%, 34%, 35%, 36%, 37%, 38%, 39%, 40%, 41%, 42%, 43%, 44%, 45%, 46%, 47%, 48%, 49%, 50%, 51%, 52%, 53%, 54%, 55%, 56%, 57%, 58%, 59%, 60%, 61%, 62%, 63%, 64%, 65%, 66%, 67%, 68%, 69%, 70%, 71%, 72%, 73%, 74%, 75%, 76%, 77%, 78%, 79%, 80%, 81%, 82%, 83%, 84%, 85%, 86%, 87%, 88%, 89%, 90%, 91%, 92%, 93%, 94%, 95%, 96%, 97%, 98%, 99%, or about 100%.

[0166] PNPLA3 protein production may be inhibited in the cell by at least about 5%, 6%, 7%, 8%, 9%, 10%, 11%, 12%, 13%, 14%, 15%, 16%, 17%, 18%, 19%, 20%, 21%, 22%, 23%, 24%, 25%, 26%, 27%, 28%, 29%, 30%, 31%, 32%, 33%, 34%, 35%, 36%, 37%, 38%, 39%, 40%, 41%, 42%, 43%, 44%, 45%, 46%, 47%, 48%, 49%, 50%, 51%, 52%, 53%, 54%, 55%, 56%, 57%, 58%, 59%, 60%, 61%, 62%, 63%, 64%, 65%, 66%, 67%, 68%, 69%, 70%, 71%, 72%, 73%, 74%, 75%, 76%, 77%, 78%, 79%, 80%, 81%, 82%, 83%, 84%, 85%, 86%, 87%, 88%, 89%, 90%, 91%, 92%, 93%, 94%, 95%, 96%, 97%, 98%, 99%, or about 100%.

[0167] The in vivo methods and uses of the invention may include administering to a subject a composition containing an RNAi, where the RNAi includes a nucleotide sequence that is complementary to at least a part of an RNA transcript of the PNPLA3 gene of the mammal to be treated. When the organism to be treated is a human, the composition can be administered by any means known in the art including, but not limited to subcutaneous, intravenous, oral, intraperitoneal, or parenteral routes, including intracranial (e.g., intraventricular, intraparenchymal and intrathecal), intramuscular, transdermal, airway (aerosol), nasal, rectal, and topical (including buccal and sublingual) administration. In certain embodiments, the compositions are administered by subcutaneous or intravenous infusion or injection. In one embodiment, the compositions are administered by subcutaneous injection.

[0168] In some embodiments, the administration is via a depot injection. A depot injection may release the RNAi in a consistent way over a prolonged time period. Thus, a depot injection may reduce the frequency of dosing needed to obtain a desired effect, e.g., a desired inhibition of PNPLA3, or a therapeutic or prophylactic effect. A depot injection may also provide more consistent serum concentrations. Depot injections may include subcutaneous injections or intramuscular injections. In preferred embodiments, the depot injection is a subcutaneous injection.

[0169] In some embodiments, the administration is via a pump. The pump may be an external pump or a surgically implanted pump. In certain embodiments, the pump is a subcutaneously implanted osmotic pump. In other embodiments, the pump is an infusion pump. An infusion pump may be used for intravenous, subcutaneous, arterial, or epidural infusions. In preferred embodiments, the infusion pump is a subcutaneous infusion pump. In other embodiments, the pump is a surgically implanted pump that delivers the RNAi to the subject.

[0170] The mode of administration may be chosen based upon whether local or systemic treatment is desired and based upon the area to be treated. The route and site of administration may be chosen to enhance targeting.

[0171] In one aspect, the present invention also provides methods for inhibiting the expression of an PNPLA3 gene in a mammal, e.g., a human. The present invention also provides a composition comprising an RNAi, e.g., a dsRNA, that targets an PNPLA3 gene in a cell of a mammal for use in inhibiting expression of the PNPLA3 gene in the mammal. In another aspect, the present invention provides use of an RNAi, e.g., a dsRNA, that targets an PNPLA3 gene in a cell of a mammal in the manufacture of a medicament for inhibiting expression of the PNPLA3 gene in the mammal.

[0172] The methods and uses include administering to the mammal, e.g., a human, a composition comprising an RNAi, e.g., a dsRNA, that targets an PNPLA3 gene in a cell of the mammal and maintaining the mammal for a time sufficient to obtain degradation of the mRNA transcript of the PNPLA3 gene, thereby inhibiting expression of the PNPLA3 gene in the mammal.

[0173] Reduction in gene expression can be assessed in peripheral blood sample of the RNAi-administered subject by any methods known it the art, e.g. qRT-PCR, described herein. Reduction in protein production can be assessed by any methods known it the art and by methods, e.g., ELISA or Western blotting, described herein. In one embodiment, a tissue sample serves as the tissue material for monitoring the reduction in PNPLA3 gene and/or protein expression. In another embodiment, a blood sample serves as the tissue material for monitoring the reduction in PNPLA3 gene and/or protein expression.

[0174] In one embodiment, verification of RISC medicated cleavage of target in vivo following administration of RNAi agent is done by performing 5′-RACE or modifications of the protocol as known in the art (Lasham A et al., (2010) Nucleic Acid Res., 38 (3) p-el9) (Zimmermann et al. (2006) Nature 441: 111-4).

[0175] It is understood that all ribonucleic acid sequences disclosed herein can be converted to deoxyribonucleic acid sequences by substituting a thymine base for a uracil base in the sequence. Likewise, all deoxyribonucleic acid sequences disclosed herein can be converted to ribonucleic acid sequences by substituting a uracil base for a thymine base in the sequence. Deoxyribonucleic acid sequences, ribonucleic acid sequences, and sequences containing mixtures of deoxyribonucleotides and ribonucleotides of all sequences disclosed herein are included in the invention.

[0176] Additionally, any nucleic acid sequences disclosed herein may be modified with any combination of chemical modifications. One of skill in the art will readily appreciate that such designation as “RNA” or “DNA” to describe modified polynucleotides is, in certain instances, arbitrary. For example, a polynucleotide comprising a nucleotide having a 2′-OH substituent on the ribose sugar and a thymine base could be described as a DNA molecule having a modified sugar (2′-OH for the natural 2′-H of DNA) or as an RNA molecule having a modified base (thymine (methylated uracil) for natural uracil of RNA).

[0177] Accordingly, nucleic acid sequences provided herein, including, but not limited to those in the sequence listing, are intended to encompass nucleic acids containing any combination of natural or modified RNA and/or DNA, including, but not limited to such nucleic acids having modified nucleobases. By way of a further example and without limitation, a polynucleotide having the sequence “ATCGATCG” encompasses any polynucleotides having such a sequence, whether modified or unmodified, including, but not limited to, such compounds comprising RNA bases, such as those having sequence “AUCGAUCG” and those having some DNA bases and some RNA bases such as “AUCGATCG” and polynucleotides having other modified bases, such as “ATmeCGAUCG,” wherein meC indicates a cytosine base comprising a methyl group at the 5-position.

[0178] The following examples, including the experiments conducted and the results achieved, are provided for illustrative purposes only and are not to be construed as limiting the scope of the appended claims.

### INCORPORATION BY REFERENCE

[0179] All publications, patents, and patent applications mentioned in this specification are herein incorporated by reference to the same extent as if each individual publication, patent, or patent application was specifically and individually indicated to be incorporated by reference. However, the citation of a reference herein should not be construed as an acknowledgement that such reference is prior art to the present invention. To the extent that any of the definitions or terms provided in the references incorporated by reference differ from the terms and discussion provided herein, the present terms and definitions control.

### EQUIVALENTS

[0180] The foregoing written specification is considered to be sufficient to enable one skilled in the art to practice the invention. The foregoing description and examples detail certain preferred embodiments of the invention and describe the best mode contemplated by the inventors. It will be appreciated, however, that no matter how detailed the foregoing may appear in text, the invention may be practiced in many ways and the invention should be construed in accordance with the appended claims and any equivalents thereof.

[0181] The following examples, including the experiments conducted and results achieved, are provided for illustrative purposes only and are not to be construed as limiting the present invention.

[0182] All animal experiments described herein were approved by the Institutional Animal Care and Use Committee (IACUC) of Amgen and cared for in accordance to the Guide for the Care and Use of Laboratory Animals, 8th Edition (National Research Council (U.S.). Committee for the Update of the Guide for the Care and Use of Laboratory Animals., Institute for Laboratory Animal Research (U.S.), and National Academies Press (U.S.) (2011) Guide for the care and use of laboratory animals. 8th Ed., National Academies Press, Washington, D.C. Mice were single-housed in an air-conditioned room at 22±2° C. with a twelve-hour light; twelve-hour darkness cycle (0600-1800 hours). Animals had ad libitum access to a regular chow diet (Envigo, 2920X, or a diet as stated otherwise) and to water (reverse osmosis-purified) via automatic watering system, unless otherwise indicated. At termination, blood was collected by cardiac puncture under deep anesthesia, and then, following Association for Assessment and Accreditation of Laboratory Animal Care (AAALAC) guidelines, euthanized by a secondary physical method.

### Example 1: Selection, Design and Synthesis of Modified PNPLA3 siRNA Molecules

[0183] The identification and selection of optimal sequences for therapeutic siRNA molecules targeting patatin-like phospholipase domain-containing 3 (PNPLA3) were identified using bioinformatics analysis of a human PNPLA3 transcript (NM_025225.2). Table 1 shows sequences identified as having therapeutic properties. Throughout the various sequences, {INVAB} is an inverted A basic, {INVDA} is an inverted deoxythymidine, GNA is a glycol nucleic acid, dT is deoxythymidine and dC is deoxycytosine.

TABLE 1
siRNA sequences directed to PNPLA3

| | | SEQ | | SEQ ID |
|---|---|---|---|---|
| DUPLEX | | ID NO: | | NO: |
| NO. | SENSE SEQUENCE (5′-3′) | (SENSE) | ANTISENSE SEQUENCE (5′-3′) | (ANTISENSE) |
| D-1000 | GGGCAAUAAAGUACCUGCUUU | 1 | AGCAGGUACUUUAUUGCCCUU | 2 |
| D-1001 | CGGCCAAUGUCCACCAGCUUU | 3 | AGCUGGUGGACAUUGGCCGUU | 4 |
| D-1002 | GGUCCAGCCUGAACUUCUUUU | 5 | AAGAAGUUCAGGCUGGACCUU | 6 |
| D-1003 | GCUUCAUCCCCUUCUACAGUU | 7 | CUGUAGAAGGGGAUGAAGCUU | 8 |
| D-1004 | GCGGCUUCCUGGGCUUCUAUU | 9 | UAGAAGCCCAGGAAGCCGCUU | 10 |
| D-1005 | GCCUCUGAGCUGAGUUGGUUU | 11 | ACCAACUCAGCUCAGAGGCUU | 12 |
| D-1006 | GUGACAACGUACCCUUCAUUU | 13 | AUGAAGGGUACGUUGUCACUU | 14 |
| D-1007 | CCCGCCUCCAGGUCCCAAAUU | 15 | UUUGGGACCUGGAGGCGGGUU | 16 |
| D-1008 | CUUCAUCCCCUUCUACAGUUU | 17 | ACUGUAGAAGGGGAUGAAGUU | 18 |
| D-1009 | GGUAUGUUCCUGCUUCAUGUU | 19 | CAUGAAGCAGGAACAUACCUU | 20 |
| D-1010 | GUAUGUUCCUGCUUCAUGCUU | 21 | GCAUGAAGCAGGAACAUACUU | 22 |
| D-1011 | UAUGUUCCUGCUUCAUGCCUU | 23 | GGCAUGAAGCAGGAACAUAUU | 24 |
| D-1012 | AUGUUCCUGCUUCAUGCCCUU | 25 | GGGCAUGAAGCAGGAACAUUU | 26 |
| D-1013 | UGUUCCUGCUUCAUGCCCUUU | 27 | AGGGCAUGAAGCAGGAACAUU | 28 |
| D-1014 | GUUCCUGCUUCAUGCCCUUUU | 29 | AAGGGCAUGAAGCAGGAACUU | 30 |
| D-1015 | UUCCUGCUUCAUGCCCUUCUU | 31 | GAAGGGCAUGAAGCAGGAAUU | 32 |
| D-1016 | UCCUGCUUCAUGCCCUUCUUU | 33 | AGAAGGGCAUGAAGCAGGAUU | 34 |
| D-1017 | CCUGCUUCAUGCCCUUCUAUU | 35 | UAGAAGGGCAUGAAGCAGGUU | 36 |
| D-1018 | CUGCUUCAUGCCCUUCUACUU | 37 | GUAGAAGGGCAUGAAGCAGUU | 38 |
| D-1019 | UGCUUCAUGCCCUUCUACAUU | 39 | UGUAGAAGGGCAUGAAGCAUU | 40 |
| D-1020 | GCUUCAUGCCCUUCUACAGUU | 41 | CUGUAGAAGGGCAUGAAGCUU | 42 |
| D-1021 | CUUCAUGCCCUUCUACAGUUU | 43 | ACUGUAGAAGGGCAUGAAGUU | 44 |
| D-1022 | UUCAUGCCCUUCUACAGUGUU | 45 | CACUGUAGAAGGGCAUGAAUU | 46 |
| D-1023 | UCAUGCCCUUCUACAGUGGUU | 47 | CCACUGUAGAAGGGCAUGAUU | 48 |
| D-1024 | CAUGCCCUUCUACAGUGGCUU | 49 | GCCACUGUAGAAGGGCAUGUU | 50 |
| D-1025 | AUGCCCUUCUACAGUGGCCUU | 51 | GGCCACUGUAGAAGGGCAUUU | 52 |
| D-1026 | UGCCCUUCUACAGUGGCCUUU | 53 | AGGCCACUGUAGAAGGGCAUU | 54 |
| D-1027 | GCCCUUCUACAGUGGCCUUUU | 55 | AAGGCCACUGUAGAAGGGCUU | 56 |
| D-1028 | GGUAUGUUCCUGCUUCAUCUU | 57 | GAUGAAGCAGGAACAUACCUU | 58 |
| D-1029 | GUAUGUUCCUGCUUCAUCCUU | 59 | GGAUGAAGCAGGAACAUACUU | 60 |
| D-1030 | UAUGUUCCUGCUUCAUCCCUU | 61 | GGGAUGAAGCAGGAACAUAUU | 62 |
| D-1031 | AUGUUCCUGCUUCAUCCCCUU | 63 | GGGGAUGAAGCAGGAACAUUU | 64 |
| D-1032 | UGUUCCUGCUUCAUCCCCUUU | 65 | AGGGGAUGAAGCAGGAACAUU | 66 |
| D-1033 | GUUCCUGCUUCAUCCCCUUUU | 67 | AAGGGGAUGAAGCAGGAACUU | 68 |
| D-1034 | UUCCUGCUUCAUCCCCUUCUU | 69 | GAAGGGGAUGAAGCAGGAAUU | 70 |
| D-1035 | UCCUGCUUCAUCCCCUUCUUU | 71 | AGAAGGGGAUGAAGCAGGAUU | 72 |
| D-1036 | CCUGCUUCAUCCCCUUCUAUU | 73 | UAGAAGGGGAUGAAGCAGGUU | 74 |
| D-1037 | CUGCUUCAUCCCCUUCUACUU | 75 | GUAGAAGGGGAUGAAGCAGUU | 76 |
| D-1038 | UGCUUCAUCCCCUUCUACAUU | 77 | UGUAGAAGGGGAUGAAGCAUU | 78 |
| D-1039 | UUCAUCCCCUUCUACAGUGUU | 79 | CACUGUAGAAGGGGAUGAAUU | 80 |
| D-1040 | UCAUCCCCUUCUACAGUGGUU | 81 | CCACUGUAGAAGGGGAUGAUU | 82 |
| D-1041 | CAUCCCCUUCUACAGUGGCUU | 83 | GCCACUGUAGAAGGGGAUGUU | 84 |
| D-1042 | UCCCCUUCUACAGUGGCCUUU | 85 | AGGCCACUGUAGAAGGGGAUU | 86 |
| D-1043 | GAUCAGGACCCGAGCCGAUUU | 87 | AUCGGCUCGGGUCCUGAUCUU | 88 |
| D-1044 | UGGGCUUCUACCACGUCGUUU | 89 | ACGACGUGGUAGAAGCCCAUU | 90 |
| D-1045 | GAGCGAGCACGCCCCGCAUUU | 91 | AUGCGGGGCGUGCUCGCUCUU | 92 |
| D-1046 | UGCACUGCGUCGGCGUCCUUU | 93 | AGGACGCCGACGCAGUGCAUU | 94 |
| D-1047 | UGGAGCAGACUCUGCAGGUUU | 95 | ACCUGCAGAGUCUGCUCCAUU | 96 |
| D-1048 | UGCAGGUCCUCUCAGAUCUUU | 97 | AGAUCUGAGAGGACCUGCAUU | 98 |
| D-1049 | CCCGGCCAAUGUCCACCAUUU | 99 | AUGGUGGACAUUGGCCGGGUU | 100 |
| D-1050 | UUCUACAGUGGCCUUAUCUUU | 101 | AGAUAAGGCCACUGUAGAAUU | 102 |
| D-1051 | UCUACAGUGGCCUUAUCCUUU | 103 | AGGAUAAGGCCACUGUAGAUU | 104 |
| D-1052 | CUUCCUUCAGAGGCGUGCUUU | 105 | AGCACGCCUCUGAAGGAAGUU | 106 |
| D-1053 | UUCCUUCAGAGGCGUGCGAUU | 107 | UCGCACGCCUCUGAAGGAAUU | 108 |
| D-1054 | GCGUGCGAUAUGUGGAUGUUU | 109 | ACAUCCACAUAUCGCACGCUU | 110 |
| D-1055 | CGUGCGAUAUGUGGAUGGAUU | 111 | UCCAUCCACAUAUCGCACGUU | 112 |
| D-1056 | UGGAUGGAGGAGUGAGUGAUU | 113 | UCACUCACUCCUCCAUCCAUU | 114 |
| D-1057 | ACGUACCCUUCAUUGAUGUUU | 115 | ACAUCAAUGAAGGGUACGUUU | 116 |
| D-1058 | UGGACAUCACCAAGCUCAUUU | 117 | AUGAGCUUGGUGAUGUCCAUU | 118 |
| D-1059 | CACCUGCGUCUCAGCAUCUUU | 119 | AGAUGCUGAGACGCAGGUGUU | 120 |
| D-1060 | ACCUGCGUCUCAGCAUCCUUU | 121 | AGGAUGCUGAGACGCAGGUUU | 122 |
| D-1061 | CCAGAGACUGGUGACAUGUUU | 123 | ACAUGUCACCAGUCUCUGGUU | 124 |
| D-1062 | AUGGCUUCCAGAUAUGCCUUU | 125 | AGGCAUAUCUGGAAGCCAUUU | 126 |
| D-1063 | CCGCCUCCAGGUCCCAAAUUU | 127 | AUUUGGGACCUGGAGGCGGUU | 128 |
| D-1064 | UACCUGCUGGUGCUGAGGUUU | 129 | ACCUCAGCACCAGCAGGUAUU | 130 |
| D-1065 | ACCUGCUGGUGCUGAGGGUUU | 131 | ACCCUCAGCACCAGCAGGUUU | 132 |
| D-1066 | CUCUCCACCUUUCCCAGUUUU | 133 | AACUGGGAAAGGUGGAGAGUU | 134 |
| D-1067 | UUUUUCACCUAACUAAAAUUU | 135 | AUUUUAGUUAGGUGAAAAAUU | 136 |
| D-1068 | CGGCCAAUGUCCACCAGCUUU | 137 | AGCUGGUGGACAUUGGCCGUU | 138 |
| D-1069 | GGUCCAGCCUGAACUUCUUUU | 139 | AAGAAGUUCAGGCUGGACCUU | 140 |
| D-1070 | GCGGCUUCCUGGGCUUCUAUU | 141 | UAGAAGCCCAGGAAGCCGCUU | 142 |
| D-1071 | GUGACAACGUACCCUUCAUUU | 143 | AUGAAGGGUACGUUGUCACUU | 144 |
| D-1072 | GGUAUGUUCCUGCUUCAUGUU | 145 | CAUGAAGCAGGAACAUACCUU | 146 |
| D-1073 | GUAUGUUCCUGCUUCAUGCUU | 147 | GCAUGAAGCAGGAACAUACUU | 148 |
| D-1074 | UGUUCCUGCUUCAUGCCCUUU | 149 | AGGGCAUGAAGCAGGAACAUU | 150 |
| D-1075 | GUUCCUGCUUCAUGCCCUUUU | 151 | AAGGGCAUGAAGCAGGAACUU | 152 |
| D-1076 | CCUGCUUCAUGCCCUUCUAUU | 153 | UAGAAGGGCAUGAAGCAGGUU | 154 |
| D-1077 | GCUUCAUGCCCUUCUACAGUU | 155 | CUGUAGAAGGGCAUGAAGCUU | 156 |
| D-1078 | CUUCAUGCCCUUCUACAGUUU | 157 | ACUGUAGAAGGGCAUGAAGUU | 158 |
| D-1079 | UUCAUGCCCUUCUACAGUGUU | 159 | CACUGUAGAAGGGCAUGAAUU | 160 |
| D-1080 | AUGGCUUCCAGAUAUGCCUUU | 161 | AGGCAUAUCUGGAAGCCAUUU | 162 |
| D-1081 | AUGCCCUUCUACAGUGGCCUU | 163 | GGCCACUGUAGAAGGGCAUUU | 164 |
| D-1082 | GCUUCAUGCCCUUCUACAUUU | 165 | AUGUAGAAGGGCAUGAAGCUU | 166 |
| D-1083 | GGAAAGACUGUUCCAAAAAUU | 333 | UUUUUGGAACAGUCUUUCCUU | 334 |
| D-1084 | GGUAUGUUCCUGCUUCAUGUU | 335 | CAUGAAGCAGGAACAUACCUU | 336 |
| D-1085 | GUAUGUUCCUGCUUCAUGCUU | 337 | GCAUGAAGCAGGAACAUACUU | 338 |
| D-1086 | UGUUCCUGCUUCAUGCCCUUU | 339 | AGGGCAUGAAGCAGGAACAUU | 340 |
| D-1087 | GCUUCAUGCCCUUCUACAGUU | 341 | CUGUAGAAGGGCAUGAAGCUU | 342 |
| D-1088 | CUUCAUGCCCUUCUACAGUUU | 343 | ACUGUAGAAGGGCAUGAAGUU | 344 |
| D-1089 | GCGGCUUCCUGGGCUUCUAUU | 345 | UAGAAGCCCAGGAAGCCGCUU | 346 |
| D-1090 | GUUCCUGCUUCAUGCCCUUUU | 347 | AAGGGCAUGAAGCAGGAACUU | 348 |
| D-1091 | AUGGCUUCCAGAUAUGCCUUU | 349 | AGGCAUAUCUGGAAGCCAUUU | 350 |
| D-1092 | CCUGCUUCAUGCCCUUCUAUU | 351 | UAGAAGGGCAUGAAGCAGGUU | 352 |
| D-1093 | UUCAUGCCCUUCUACAGUUUU | 353 | AACUGUAGAAGGGCAUGAAUU | 354 |
| D-1094 | UUCAUGCCCUUCUACAGUGUU | 355 | CACUGUAGAAGGGCAUGAAUU | 356 |
| D-1095 | GCUUCAUGCCCUUCUACAUUU | 357 | AUGUAGAAGGGCAUGAAGCUU | 358 |
| D-1096 | GGUCCAGCCUGAACUUCUUUU | 359 | AAGAAGUUCAGGCUGGACCUU | 360 |
| D-1097 | GCGGCUUCCUGGGCUUCUAUU | 361 | UAGAAGCCCAGGAAGCCGCUU | 362 |
| D-1098 | GCGGCUUCCUGGGCUUCUAUU | 363 | UAGAAGCCCAGGAAGCCGCUU | 364 |
| D-1099 | GUUCCUGCUUCAUGCCCUUUU | 365 | AAGGGCAUGAAGCAGGAACUU | 366 |
| D-1100 | GUUCCUGCUUCAUGCCCUUUU | 367 | AAGGGCAUGAAGCAGGAACUU | 368 |
| D-1101 | CCUGCUUCAUGCCCUUCUAUU | 369 | UAGAAGGGCAUGAAGCAGGUU | 370 |
| D-1102 | CCUGCUUCAUGCCCUUCUAUU | 371 | UAGAAGGGCAUGAAGCAGGUU | 372 |
| D-1103 | AUGCCCUUCUACAGUGGCCUU | 373 | GGCCACUGUAGAAGGGCAUUU | 374 |
| D-1104 | AUGGCUUCCAGAUAUGCCUUU | 375 | AGGCAUAUCUGGAAGCCAUUU | 376 |
| D-1105 | GUGACAACGUACCCUUCAUUU | 377 | AUGAAGGGUACGUUGUCACUU | 378 |
| D-1106 | GUAUGUUCCUGCUUCAUGCUU | 379 | GCAUGAAGCAGGAACAUACUU | 380 |
| D-1107 | GUAUGUUCCUGCUUCAUGCUU | 381 | GCAUGAAGCAGGAACAUACUU | 382 |
| D-1108 | GUAUGUUCCUGCUUCAUGCUU | 383 | GCAUGAAGCAGGAACAUACUU | 384 |
| D-1109 | GUAUGUUCCUGCUUCAUGCCU | 385 | AGGCAUGAAGCAGGAACAUACUU | 386 |
| D-1110 | UGGUAUGUUCCUGCUUCAUGU | 387 | GCAUGAAGCAGGAACAUACCAUU | 388 |
| D-1111 | GUAUGUUCCUGCUUCAUGU | 389 | GCAUGAAGCAGGAACAUACUU | 390 |
| D-1112 | GUAUGUUCCUGCUUCAUGC{INVAB} | 391 | GCAUGAAGCAGGAACAUACUU | 392 |
| D-1113 | GCUUCAUGCCCUUCUACAUUU | 393 | AUGUAGAAGGGCAUGAAGCUU | 394 |
| D-1114 | GCUUCAUGCCCUUCUACAUUU | 395 | AUGUAGAAGGGCAUGAAGCUU | 396 |
| D-1115 | GCUUCAUGCCCUUCUACAUUU | 397 | AUGUAGAAGGGCAUGAAGCUU | 398 |
| D-1116 | GCUUCAUGCCCUUCUACAUUU | 399 | AUGUAGAAGGGCAUGAAGCUU | 400 |
| D-1117 | GCUUCAUGCCCUUCUACAUUU | 401 | AUGUAGAAGGGCAUGAAGCUU | 402 |
| D-1118 | GCUUCAUGCCCUUCUACAUUU | 403 | AUGUAGAAGGGCAUGAAGCUU | 404 |
| D-1119 | GCUUCAUGCCCUUCUACAUUU | 405 | AUGUAGAAGGGCAUGAAGCUU | 406 |
| D-1120 | GCUUCAUGCCCUUCUACAUUU | 407 | AUGUAGAAGGGCAUGAAGCUU | 408 |
| D-1121 | GCUUCAUGCCCUUCUACAUUU | 409 | AUGUAGAAGGGCAUGAAGCUU | 410 |
| D-1122 | GCUUCAUGCCCUUCUACAUUU | 411 | AUGUAGAAGGGCAUGAAGCUU | 412 |
| D-1123 | GCUUCAUGCCCUUCUACAUUU | 413 | AUGUAGAAGGGCAUGAAGCUU | 414 |
| D-1124 | GCUUCAUGCCCUUCUACAUUU | 415 | AUGUAGAAGGGCAUGAAGCUU | 416 |
| D-1125 | GCUUCAUGCCCUUCUACAUUU | 417 | AUGUAGAAGGGCAUGAAGCUU | 418 |
| D-1126 | GCUUCAUGCCCUUCUACAUUU | 419 | AUGUAGAAGGGCAUGAAGCUU | 420 |
| D-1127 | GCUUCAUGCCCUUCUACAUUU | 421 | AUGUAGAAGGGCAUGAAGCUU | 422 |
| D-1128 | GCUUCAUGCCCUUCUACAUUU | 423 | AUGUAGAAGGGCAUGAAGCUU | 424 |
| D-1129 | GCUUCAUG[DC]CCUUCUACAUUU | 425 | AUGUAGAAGGGCAUGAAGCUU | 426 |
| D-1130 | GCUUCAUGCC[DC]UUCUACAUUU | 427 | AUGUAGAAGGGCAUGAAGCUU | 428 |
| D-1131 | GCUUCAUGC[DC]CUUCUACAUUU | 429 | AUGUAGAAGGGCAUGAAGCUU | 430 |
| D-1132 | GCUUCAUGCCCUUCUACAUUU | 431 | AUGUAGAAGGGCAUGAAGCUU | 432 |
| D-1133 | GCUUCAUGCCCUUCUACAUUU | 433 | AUGUAGAAGGGCAUGAAGCUU | 434 |
| D-1134 | GCUUCAUGCCCUUCUACAUUU | 435 | AUGUAGAAGGGCAUGAAGCUU | 436 |
| D-1135 | GCUUCAUGCCCUUCUACAUUU | 437 | AUGUAGAAGGGCAUGAAGCUU | 438 |
| D-1136 | GCUUCAUGCCCUUCUACAUUU | 439 | AUGUAGAAGGGCAUGAAGCUU | 440 |
| D-1137 | GCUUCAUGCCCUUCUACAGUU | 441 | AACUGUAGAAGGGCAUGAAGCUU | 442 |
| D-1138 | CUGCUUCAUGCCCUUCUACAU | 443 | AUGUAGAAGGGCAUGAAGCAGUU | 444 |
| D-1139 | GCUUCAUGCCCUUCUACAU | 445 | AUGUAGAAGGGCAUGAAGCUU | 446 |
| D-1140 | GCUUCAUGCCCUUCUACAU{INVAB} | 447 | AUGUAGAAGGGCAUGAAGCUU | 448 |
| D-1141 | GCUUCAUGCCCUUCUACAUUU{INVAB} | 449 | AUGUAGAAGGGCAUGAAGCUU | 450 |
| D-1142 | GCUUCAUGCCCUUCUACAUUU | 451 | AUGUAGAAGGGCAUGAAGCUU | 452 |
| D-1143 | GCUUCAUGCCCUUCUACAUUU | 453 | AUGUAGAAGGGCAUGAAGCUU | 454 |
| D-1144 | GCUUCAUGCCCUUCUACAUUU | 455 | AUGUAGAAGGGCAUGAAGCUU | 456 |
| D-1145 | GCUUCAUGCCCUUCUACAUUU | 457 | AUGUAGAAGGGCAUGAAGCUU | 458 |
| D-1146 | GCUUCAUGCCCUUCUACAUUU | 459 | AUGUAGAAGGGCAUGAAGCUU | 460 |
| D-1147 | GCUUCAUGCCCUUCUACAUUU | 461 | AUGUAGAAGGGCAUGAAGCUU | 462 |
| D-1148 | GCUUCAUGCCCUUCUACAUUU | 463 | AUGUAGAAGGGCAUGAAGCUU | 464 |
| D-1149 | GCUUCAUGCCCUUCUACAUUU | 465 | AUGUAGAAGGGCAUGAAGCUU | 466 |
| D-1150 | GCUUCAUGCCCUUCUACAUUU | 467 | AUGUAGAAGGGCAUGAAGCUU | 468 |
| D-1151 | GUAUGUUCCUGCUUCAUGCUU{INVAB} | 469 | GCAUGAAGCAGGAACAUACUU | 470 |
| D-1152 | GGUAUGUUCCUGCUUCAUUUU | 471 | AAUGAAGCAGGAACAUACCUU | 472 |
| D-1153 | GUAUGUUCCUGCUUCAUGUUU | 473 | ACAUGAAGCAGGAACAUACUU | 474 |
| D-1154 | CGGCCAAUGUCCACCAGCUUU | 475 | AGCUGGUGGACAUUGGCCGUU | 476 |
| D-1155 | UGGAGCAGACUCUGCAGGUUU | 477 | ACCUGCAGAGUCUGCUCCAUU | 478 |
| D-1156 | ACGUACCCUUCAUUGAUGUUU | 479 | ACAUCAAUGAAGGGUACGUUU | 480 |
| D-1157 | CCAGAGACUGGUGACAUGUUU | 481 | ACAUGUCACCAGUCUCUGGUU | 482 |
| D-1158 | [INVAB]GCUUCAUGCCUUUCUACAUUU | 483 | AUGUAGAAAGGCAUGAAGCUU | 484 |
| D-1159 | [INVAB]GCUUCAUGCCUUUCUACAUUU | 485 | AAAUGUAGAAAGGCAUGAAGCUU | 486 |
| D-1160 | [INVAB]GCUUCAUGCCUUUCUACAUUU | 487 | AAAUGUAGAAAGGCAUGAAGCUU | 488 |
| D-1161 | UGCUUCAUGCCUUUCUACAUU | 489 | UGUAGAAAGGCAUGAAGCAUU | 490 |
| D-1162 | UAUGUUCCUGCUUCAUGCUUU | 491 | AGCAUGAAGCAGGAACAUAUU | 492 |
| D-1163 | UUCCUGCUUCAUGCCUUUUUU | 493 | AAAAGGCAUGAAGCAGGAAUU | 494 |
| D-1164 | UCAUGCCUUUCUACAGUGUUU | 495 | ACACUGUAGAAAGGCAUGAUU | 496 |
| D-1165 | CAUGCCUUUCUACAGUGGUUU | 497 | ACCACUGUAGAAAGGCAUGUU | 498 |
| D-1166 | AUGCCUUUCUACAGUGGCUUU | 499 | AGCCACUGUAGAAAGGCAUUU | 500 |
| D-1167 | GGUAUGUUCCUGCUUCAUAUU | 501 | UAUGAAGCAGGAACAUACCUU | 502 |
| D-1168 | GUAUGUUCCUGCUUCAUGAUU | 503 | UCAUGAAGCAGGAACAUACUU | 504 |
| D-1169 | UAUGUUCCUGCUUCAUGCAUU | 505 | UGCAUGAAGCAGGAACAUAUU | 506 |
| D-1170 | UUCCUGCUUCAUGCCUUUAUU | 507 | UAAAGGCAUGAAGCAGGAAUU | 508 |
| D-1171 | CUGCUUCAUGCCUUUCUAAUU | 509 | UUAGAAAGGCAUGAAGCAGUU | 510 |
| D-1172 | GCUUCAUGCCUUUCUACAAUU | 511 | UUGUAGAAAGGCAUGAAGCUU | 512 |
| D-1173 | UUCAUGCCUUUCUACAGUAUU | 513 | UACUGUAGAAAGGCAUGAAUU | 514 |
| D-1174 | UCAUGCCUUUCUACAGUGAUU | 515 | UCACUGUAGAAAGGCAUGAUU | 516 |
| D-1175 | CAUGCCUUUCUACAGUGGAUU | 517 | UCCACUGUAGAAAGGCAUGUU | 518 |
| D-1176 | AUGCCUUUCUACAGUGGCAUU | 519 | UGCCACUGUAGAAAGGCAUUU | 520 |
| D-1177 | ACGUACCCUUCAUUGAUGAUU | 521 | UCAUCAAUGAAGGGUACGUUU | 522 |
| D-1178 | CCAGAGACUGGUGACAUGAUU | 523 | UCAUGUCACCAGUCUCUGGUU | 524 |
| D-1179 | AUGGCUUCCAGAUAUGCCAUU | 525 | UGGCAUAUCUGGAAGCCAUUU | 526 |
| D-1180 | GUUCCUGCUUCAUGCCUUUUU | 527 | AAAGGCAUGAAGCAGGAACUU | 528 |
| D-1181 | CCUGCUUCAUGCCUUUCUAUU | 529 | UAGAAAGGCAUGAAGCAGGUU | 530 |
| D-1182 | GCUUCAUGCCUUUCUACAUUU | 531 | AUGUAGAAAGGCAUGAAGCUU | 532 |
| D-1183 | CUUCAUGCCUUUCUACAGUUU | 533 | ACUGUAGAAAGGCAUGAAGUU | 534 |
| D-1184 | UUCAUGCCUUUCUACAGUUUU | 535 | AACUGUAGAAAGGCAUGAAUU | 536 |
| D-1185 | GCUUCAUCCCUUUCUACAUUU | 537 | AUGUAGAAAGGGAUGAAGCUU | 538 |
| D-1186 | [INVAB]GCUUCAUGCCCUUCUACAUUU | 539 | AUGUAGAAGGGCAUGAAGCUU | 540 |
| D-1187 | [INVAB]GCUUCAUGCCCUUCUACAUUU | 541 | AAAUGUAGAAGGGCAUGAAGCUU | 542 |
| D-1188 | [INVAB]GCUUCAUGCCCUUCUACAUUU | 543 | AAAUGUAGAAGGGCAUGAAGCUU | 544 |
| D-1189 | [INVAB]GCGGCUUCCUGGGCUUCUAUU | 545 | UAGAAGCCCAGGAAGCCGCUU | 546 |
| D-1190 | [INVAB]CUGCGGCUUCCUGGGCUUCUA | 547 | UAGAAGCCCAGGAAGCCGCAGUU | 548 |
| D-1191 | CUGCGGCUUCCUGGGCUUCU{INVAB} | 549 | UAGAAGCCCAGGAAGCCGCAGUU | 550 |
| D-1192 | [INVAB]CUGCGGCUUCCUGGGCUUCUA | 551 | UAGAAGCCCAGGAAGCCGCAGUU | 552 |
| D-1193 | [INVAB]GCGGCUUCCUGGGCUUCUAUU | 553 | UAGAAGCCCAGGAAGCCGCUU | 554 |
| D-1194 | CUGCGGCUUCCUGGGCUUCU{INVAB} | 555 | UAGAAGCCCAGGAAGCCGCAGUU | 556 |
| D-1195 | [INVAB]CUGCGGCUUCCUGGGCUUCUA | 557 | UAGAAGCCCAGGAAGCCGCAGUU | 558 |
| D-1196 | [INVAB]GCGGCUUCCUGGGCUUCUAUU | 559 | UAGAAGCCCAGGAAGCCGCUU | 560 |
| D-1197 | CUGCGGCUUCCUGGGCUUCU{INVAB} | 561 | UAGAAGCCCAGGAAGCCGCAGUU | 562 |
| D-1198 | [INVAB]CUGCGGCUUCCUGGGCUUCUA | 563 | UAGAAGCCCAGGAAGCCGCAGUU | 564 |
| D-1199 | [INVAB]GCGGCUUCCUGGGCUUCUAUU | 565 | UAGAAGCCCAGGAAGCCGCUU | 566 |
| D-1200 | [INVAB]CUGCGGCUUCCUGGGCUUCUA | 567 | UAGAAGCCCAGGAAGCCGCAGUU | 568 |
| D-1201 | [INVAB]CUGCGGCUUCCUGGGCUUCUA | 569 | UAGAAGCCCAGGAAGCCGCAGUU | 570 |
| D-1202 | [INVAB]CUGCGGCUUCCUGGGCUUCUA | 571 | UAGAAGCCCAGGAAGCCGCAGUU | 572 |
| D-1203 | [INVAB]AUGGCUUCCAGAUAUGCCUUU | 573 | AGGCAUAUCUGGAAGCCAUUU | 574 |
| D-1204 | [INVAB]ACAUGGCUUCCAGAUAUGCCU | 575 | AGGCAUAUCUGGAAGCCAUGUUU | 576 |
| D-1205 | ACAUGGCUUCCAGAUAUGCC{INVAB} | 577 | AGGCAUAUCUGGAAGCCAUGUUU | 578 |
| D-1206 | [INVAB]ACAUGGCUUCCAGAUAUGCCU | 579 | AGGCAUAUCUGGAAGCCAUGUUU | 580 |
| D-1207 | [INVAB]AUGGCUUCCAGAUAUGCCUUU | 581 | AGGCAUAUCUGGAAGCCAUUU | 582 |
| D-1208 | ACAUGGCUUCCAGAUAUGCC{INVAB} | 583 | AGGCAUAUCUGGAAGCCAUGUUU | 584 |
| D-1209 | [INVAB]ACAUGGCUUCCAGAUAUGCCU | 585 | AGGCAUAUCUGGAAGCCAUGUUU | 586 |
| D-1210 | [INVAB]AUGGCUUCCAGAUAUGCCUUU | 587 | AGGCAUAUCUGGAAGCCAUUU | 588 |
| D-1211 | ACAUGGCUUCCAGAUAUGCC{INVAB} | 589 | AGGCAUAUCUGGAAGCCAUGUUU | 590 |
| D-1212 | [INVAB]ACAUGGCUUCCAGAUAUGCCU | 591 | AGGCAUAUCUGGAAGCCAUGUUU | 592 |
| D-1213 | [INVAB]AUGGCUUCCAGAUAUGCCUUU | 593 | AGGCAUAUCUGGAAGCCAUUU | 594 |
| D-1214 | ACAUGGCUUCCAGAUAUGCC{INVAB} | 595 | AGGCAUAUCUGGAAGCCAUGUUU | 596 |
| D-1215 | [INVAB]ACAUGGCUUCCAGAUAUGCCU | 597 | AGGCAUAUCUGGAAGCCAUGUUU | 598 |
| D-1216 | [INVAB]ACAUGGCUUCCAGAUAUGCCU | 599 | AGGCAUAUCUGGAAGCCAUGUUU | 600 |
| D-1217 | [INVAB]ACAUGGCUUCCAGAUAUGCCU | 601 | AGGCAUAUCUGGAAGCCAUGUUU | 602 |
| D-1218 | [INVAB]ACAUGGCUUCCAGAUAUGCCU | 603 | AGGCAUAUCUGGAAGCCAUGUUU | 604 |
| D-1219 | [INVAB]ACGUACCCUUCAUUGAUGUUU | 605 | ACAUCAAUGAAGGGUACGUUU | 606 |
| D-1220 | [INVAB]CAACGUACCCUUCAUUGAUGU | 607 | ACAUCAAUGAAGGGUACGUUGUU | 608 |
| D-1221 | [INVAB]CAACGUACCCUUCAUUGAUGU | 609 | ACAUCAAUGAAGGGUACGUUGUU | 610 |
| D-1222 | [INVAB]ACGUACCCUUCAUUGAUGUUU | 611 | ACAUCAAUGAAGGGUACGUUU | 612 |
| D-1223 | CAACGUACCCUUCAUUGAUG{INVAB} | 613 | ACAUCAAUGAAGGGUACGUUGUU | 614 |
| D-1224 | [INVAB]ACGUACCCUUCAUUGAUGUUU | 615 | ACAUCAAUGAAGGGUACGUUU | 616 |
| D-1225 | CAACGUACCCUUCAUUGAUG{INVAB} | 617 | ACAUCAAUGAAGGGUACGUUGUU | 618 |
| D-1226 | [INVAB]CAACGUACCCUUCAUUGAUGU | 619 | ACAUCAAUGAAGGGUACGUUGUU | 620 |
| D-1227 | [INVAB]ACGUACCCUUCAUUGAUGUUU | 621 | ACAUCAAUGAAGGGUACGUUU | 622 |
| D-1228 | CAACGUACCCUUCAUUGAUG{INVAB} | 623 | ACAUCAAUGAAGGGUACGUUGUU | 624 |
| D-1229 | [INVAB]CAACGUACCCUUCAUUGAUGU | 625 | ACAUCAAUGAAGGGUACGUUGUU | 626 |
| D-1230 | [INVAB]CAACGUACCCUUCAUUGAUGU | 627 | ACAUCAAUGAAGGGUACGUUGUU | 628 |
| D-1231 | [INVAB]CAACGUACCCUUCAUUGAUGU | 629 | ACAUCAAUGAAGGGUACGUUGUU | 630 |
| D-1232 | [INVAB]CAACGUACCCUUCAUUGAUGU | 631 | ACAUCAAUGAAGGGUACGUUGUU | 632 |
| D-1233 | CUGCUUCAUGCCUUUCUACAU | 633 | AUGUAGAAAGGCAUGAAGCAGUU | 634 |
| D-1234 | CUGCUUCAUGCCUUUCUACAU | 635 | AUGUAGAAAGGCAUGAAGCAGUU | 636 |
| D-1235 | [INVAB]GCUUCAUGCCUUUCUACAUUU | 637 | AUGUAGAAAGGCAUGAAGCUU | 638 |
| D-1236 | [INVAB]GCUUCAUGCCUUUCUACAUUU | 639 | AUGUAGAAAGGCAUGAAGCUU | 640 |
| D-1237 | CUGCUUCAUGCCUUUCUACAU | 641 | AUGUAGAAAGGCAUGAAGCAGUU | 642 |
| D-1238 | CUGCUUCAUGCCUUUCUACAU | 643 | AUGUAGAAAGGCAUGAAGCAGUU | 644 |
| D-1239 | [INVAB]CUGCUUCAUGCCUUUCUACAU | 645 | AUGUAGAAAGGCAUGAAGCAGUU | 646 |
| D-1240 | CUGCUUCAUGCCUUUCUACA{INVAB} | 647 | AUGUAGAAAGGCAUGAAGCAGUU | 648 |
| D-1241 | [INVAB]CUGCUUCAUGCCUUUCUACAU | 649 | AUGUAGAAAGGCAUGAAGCAGUU | 650 |
| D-1242 | [INVAB]CUGCUUCAUGC[DC]UUUCUACAU | 651 | AUGUAGAAAGGCAUGAAGCAGUU | 652 |
| D-1243 | CUGCUUCAUGCCUUUCUACAU | 653 | AUGUAGAAAGGCAUGAAGCAGUU | 654 |
| D-1244 | [INVAB]CUGCUUCAUGCCUUUCUACAU | 655 | AUGUAGAAAGGCAUGAAGCAGUU | 656 |
| D-1245 | CUGCUUCAUGCCUUUCUACAU | 657 | AUGUAGAAAGGCAUGAAGCAGUU | 658 |
| D-1246 | CUGCUUCAUGCCUUUCUACA{INVAB} | 659 | AUGUAGAAAGGCAUGAAGCAGUU | 660 |
| D-1247 | [INVAB]CUGCUUCAUGCCUUUCUACAU | 661 | AUGUAGAAAGGCAUGAAGCAGUU | 662 |
| D-1248 | CUGCUUCAUGCCUUUCUACAU | 663 | AUGUAGAAAGGCAUGAAGCAGUU | 664 |
| D-1249 | CUGCUUCAUGCCUUUCUACA{INVAB} | 665 | AUGUAGAAAGGCAUGAAGCAGUU | 666 |
| D-1250 | [INVAB]CUGCUUCAUGCCUUUCUACAU | 667 | AUGUAGAAAGGCAUGAAGCAGUU | 668 |
| D-1251 | CUGCUUCAUGCCUUUCUACA{INVAB} | 669 | AUGUAGAAAGGCAUGAAGCAGUU | 670 |
| D-1252 | [INVAB]CUGCUUCAUGCCUUUCUACAU | 671 | AUGUAGAAAGGCAUGAAGCAGUU | 672 |
| D-1253 | [INVAB]GCUUCAUGCCUUUCUACAUUU | 673 | AUGUAGAAAGGCAUGAAGCUU | 674 |
| D-1254 | [INVAB]GCUUCAUGCCUUUCUACAUUU | 675 | AUGUAGAAAGGCAUGAAGCUU | 676 |
| D-1255 | [INVAB]GCUUCAUGCCUUUCUACAUUU | 677 | AUGUAGAAAGGCAUGAAGCUU | 678 |
| D-1256 | [INVAB]GCUUCAUGCCUUUCUACAUUU | 679 | AUGUAGAAAGGCAUGAAGCUU | 680 |
| D-1257 | [INVAB]GCUUCAUGCCUUUCUACAUUU | 681 | AUGUAGAAAGGCAUGAAGCUU | 682 |
| D-1258 | CUGCUUCAUGCCCUUCUACAU | 683 | AUGUAGAAGGGCAUGAAGCAGUU | 684 |
| D-1259 | [INVAB]GCUUCAUGCCCUUCUACAUUU | 685 | AUGUAGAAGGGCAUGAAGCUU | 686 |
| D-1260 | [INVAB]GCUUCAUGCCCUUCUACAUUU | 687 | AUGUAGAAGGGCAUGAAGCUU | 688 |
| D-1261 | [INVAB]GCUUCAUGCCCUUCUACAUUU | 689 | AUGUAGAAGGGCAUGAAGCUU | 690 |
| D-1262 | CUGCUUCAUGCCCUUCUACA{INVAB} | 691 | AUGUAGAAGGGCAUGAAGCAGUU | 692 |
| D-1263 | [INVAB]CUGCUUCAUGCCCUUCUACAU | 693 | AUGUAGAAGGGCAUGAAGCAGUU | 694 |
| D-1264 | [INVAB]GCUUCAUGCCCUUCUACAUUU | 695 | AUGUAGAAGGGCAUGAAGCUU | 696 |
| D-1265 | AUGUUCCUGCUUCAUGCCUUU | 697 | AGGCAUGAAGCAGGAACAUUU | 698 |
| D-1266 | UGUUCCUGCUUCAUGCCUUUU | 699 | AAGGCAUGAAGCAGGAACAUU | 700 |
| D-1267 | UGCCUUUCUACAGUGGCCUUU | 701 | AGGCCACUGUAGAAAGGCAUU | 702 |
| D-1268 | CGUACUUCGUCCUUGUAUGUU | 703 | CAUACAAGGACGAAGUACGUU | 704 |
| D-1269 | [INVAB]GCUUCAUGC[DC]CUUCUACAUUU | 705 | AUGUAGAAGGGCAUGAAGCUU | 706 |
| D-1270 | [INVAB]GCUUCAUGCCCUUCUACAUUU | 707 | AUGUAGAAGGGCAUGAAGCUU | 708 |
| D-1271 | [INVAB]GCUUCAUGCCCUUCUACAUUU | 709 | AUGUAGAAGGGCAUGAAGCUU | 710 |
| D-1272 | [INVAB]GCUUCAUGCCCUUCUACAUUU | 711 | AUGUAGAAGGGCAUGAAGCUU | 712 |
| D-1273 | [INVAB]GCUUCAUGCCCUUCUACAUUU | 713 | AUGUAGAAGGGCAUGAAGCUU | 714 |
| D-1274 | [INVAB]GCUUCAUGCCCUUCUACAUUU | 715 | AUGUAGAAGGGCAUGAAGCUU | 716 |
| D-1275 | [INVAB]CCUGCUUCAUGCCUUUCUAUU | 717 | UAGAAAGGCAUGAAGCAGGUU | 718 |
| D-1276 | [INVAB]CCUGCUUCAUGCCUUUCUAUU | 719 | UAGAAAGGCAUGAAGCAGGUU | 720 |
| D-1277 | UUCCUGCUUCAUGCCUUUCU{INVAB} | 721 | UAGAAAGGCAUGAAGCAGGAAUU | 722 |
| D-1278 | [INVAB]CCUGCUUCAUGCCUUUCUAUU | 723 | UAGAAAGGCAUGAAGCAGGUU | 724 |
| D-1279 | UUCCUGCUUCAUGCCUUUCU{INVAB} | 725 | UAGAAAGGCAUGAAGCAGGAAUU | 726 |
| D-1280 | [INVAB]AUGCCUUUCUACAGUGGCUUU | 727 | AGCCACUGUAGAAAGGCAUUU | 728 |
| D-1281 | [INVAB]AUGCCUUUCUACAGUGGCUUU | 729 | AGCCACUGUAGAAAGGCAUUU | 730 |
| D-1282 | [INVAB]AUGCCUUUCUACAGUGGCUUU | 731 | AGCCACUGUAGAAAGGCAUUU | 732 |
| D-1283 | UCAUGCCUUUCUACAGUGGC{INVAB} | 733 | AGCCACUGUAGAAAGGCAUGAUU | 734 |
| D-1284 | [INVAB]AUGCCUUUCUACAGUGGCUUU | 735 | AGCCACUGUAGAAAGGCAUUU | 736 |
| D-1285 | [INVAB]UCAUGCCUUUCUACAGUGGCU | 737 | AGCCACUGUAGAAAGGCAUGAUU | 738 |
| D-1286 | [INVAB]UGCUUCAUGCCUUUCUACAGU | 739 | ACUGUAGAAAGGCAUGAAGCAUU | 740 |
| D-1287 | [INVAB]CUUCAUGCCUUUCUACAGUUU | 741 | ACUGUAGAAAGGCAUGAAGUU | 742 |
| D-1289 | UGCUUCAUGCCUUUCUACAG{INVAB} | 743 | ACUGUAGAAAGGCAUGAAGCAUU | 744 |
| D-1290 | [INVAB]CUUCAUGCCUUUCUACAGUUU | 745 | ACUGUAGAAAGGCAUGAAGUU | 746 |
| D-1291 | UGCUUCAUGCCUUUCUACAG{INVAB} | 747 | ACUGUAGAAAGGCAUGAAGCAUU | 748 |
| D-1292 | [INVAB]UGCUUCAUGCCUUUCUACAGU | 749 | ACUGUAGAAAGGCAUGAAGCAUU | 750 |
| D-1293 | [INVAB]UGCUUCAUGCCUUUCUACAGU | 751 | ACUGUAGAAAGGCAUGAAGCAUU | 752 |
| D-1294 | [INVAB]UGCUUCAUGCCUUUCUACAGU | 753 | ACUGUAGAAAGGCAUGAAGCAUU | 754 |
| D-1295 | [INVAB]UGCUUCAUGCCUUUCUACAGU | 755 | ACUGUAGAAAGGCAUGAAGCAUU | 756 |
| D-1296 | [INVAB]GUUCCUGCUUCAUGCCUUUUU | 757 | AAAGGCAUGAAGCAGGAACUU | 758 |
| D-1297 | [INVAB]CCUGCUUCAUGCCUUUCUAUU | 759 | UAGAAAGGCAUGAAGCAGGUU | 760 |
| D-1298 | [INVAB]CUUCAUGCCUUUCUACAGUUU | 761 | ACUGUAGAAAGGCAUGAAGUU | 762 |
| D-1299 | [INVAB]UUCCUGCUUCAUGCCUUUCUA | 763 | UAGAAAGGCAUGAAGCAGGAAUU | 764 |
| D-1300 | UUCCUGCUUCAUGCCUUUCU{INVAB} | 765 | UAGAAAGGCAUGAAGCAGGAAUU | 766 |
| D-1301 | [INVAB]UUCCUGCUUCAUGCCUUUCUA | 767 | UAGAAAGGCAUGAAGCAGGAAUU | 768 |
| D-1302 | UUCCUGCUUCAUGCCUUUCU{INVAB} | 769 | UAGAAAGGCAUGAAGCAGGAAUU | 770 |
| D-1303 | [INVAB]UUCCUGCUUCAUGCCUUUCUA | 771 | UAGAAAGGCAUGAAGCAGGAAUU | 772 |
| D-1304 | [INVAB]UUCCUGCUUCAUGCCUUUCUA | 773 | UAGAAAGGCAUGAAGCAGGAAUU | 774 |
| D-1305 | [INVAB]UUCCUGCUUCAUGCCUUUCUA | 775 | UAGAAAGGCAUGAAGCAGGAAUU | 776 |
| D-1306 | [INVAB]UUCCUGCUUCAUGCCUUUCUA | 777 | UAGAAAGGCAUGAAGCAGGAAUU | 778 |
| D-1307 | [INVAB]UUCCUGCUUCAUGCCUUUCUA | 779 | UAGAAAGGCAUGAAGCAGGAAUU | 780 |
| D-1308 | [INVAB]UUCCUGCUUCAUGCCUUUCUA | 781 | UAGAAAGGCAUGAAGCAGGAAUU | 782 |
| D-1309 | [INVAB]UCAUGCCUUUCUACAGUGGCU | 783 | AGCCACUGUAGAAAGGCAUGAUU | 784 |
| D-1310 | UCAUGCCUUUCUACAGUGGC{INVAB} | 785 | AGCCACUGUAGAAAGGCAUGAUU | 786 |
| D-1311 | [INVAB]UCAUGCCUUUCUACAGUGGCU | 787 | AGCCACUGUAGAAAGGCAUGAUU | 788 |
| D-1312 | UCAUGCCUUUCUACAGUGGC{INVAB} | 789 | AGCCACUGUAGAAAGGCAUGAUU | 790 |
| D-1313 | [INVAB]UCAUGCCUUUCUACAGUGGCU | 791 | AGCCACUGUAGAAAGGCAUGAUU | 792 |
| D-1314 | [INVAB]UCAUGCCUUUCUACAGUGGCU | 793 | AGCCACUGUAGAAAGGCAUGAUU | 794 |
| D-1315 | UCAUGCCUUUCUACAGUGGC{INVAB} | 795 | AGCCACUGUAGAAAGGCAUGAUU | 796 |
| D-1316 | [INVAB]UCAUGCCUUUCUACAGUGGCU | 797 | AGCCACUGUAGAAAGGCAUGAUU | 798 |
| D-1317 | [INVAB]UCAUGCCUUUCUACAGUGGCU | 799 | AGCCACUGUAGAAAGGCAUGAUU | 800 |
| D-1318 | [INVAB]UCAUGCCUUUCUACAGUGGCU | 801 | AGCCACUGUAGAAAGGCAUGAUU | 802 |
| D-1319 | [INVAB]UGCUUCAUGCCUUUCUACAGU | 803 | ACUGUAGAAAGGCAUGAAGCAUU | 804 |
| D-1320 | UGCUUCAUGCCUUUCUACAG{INVAB} | 805 | ACUGUAGAAAGGCAUGAAGCAUU | 806 |
| D-1321 | UGCUUCAUGCCUUUCUACAG{INVAB} | 807 | ACUGUAGAAAGGCAUGAAGCAUU | 808 |
| D-1322 | [INVAB]UGCUUCAUGCCUUUCUACAGU | 809 | ACUGUAGAAAGGCAUGAAGCAUU | 810 |
| D-1323 | [INVAB]CUUCAUGCCUUUCUACAGUUU | 811 | ACUGUAGAAAGGCAUGAAGUU | 812 |
| D-1324 | [INVAB]UGCUUCAUGCCUUUCUACAGU | 813 | ACUGUAGAAAGGCAUGAAGCAUU | 814 |
| D-1325 | [INVAB]GCUUCAUGCCUUUCUACAUUU | 815 | AUGUAGAAAGGCAUGAAGCUU | 816 |
| D-1326 | [INVAB]CAUGCCUUUCUACAGUGGUUU | 817 | ACCACUGUAGAAAGGCAUGUU | 818 |
| D-1327 | [INVAB]CUGCUUCAUGCCUUUCUAAUU | 819 | UUAGAAAGGCAUGAAGCAGUU | 820 |
| D-1328 | [INVAB]GCUUCAUGCCUUUCUACAAUU | 821 | UUGUAGAAAGGCAUGAAGCUU | 822 |
| D-1329 | [INVAB]UUCAUGCCUUUCUACAGUAUU | 823 | UACUGUAGAAAGGCAUGAAUU | 824 |
| D-1330 | [INVAB]GUUCCUGCUUCAUGCCUUUUU | 825 | AAAGGCAUGAAGCAGGAACUU | 826 |
| D-1331 | AUGUUCCUGCUUCAUGCCUU{INVAB} | 827 | AAAGGCAUGAAGCAGGAACAUUU | 828 |
| D-1332 | [INVAB]AUGUUCCUGCUUCAUGCCUUU | 829 | AAAGGCAUGAAGCAGGAACAUUU | 830 |
| D-1333 | [INVAB]GUUCCUGCUUCAUGCCUUUUU | 831 | AAAGGCAUGAAGCAGGAACUU | 832 |
| D-1334 | AUGUUCCUGCUUCAUGCCUU{INVAB} | 833 | AAAGGCAUGAAGCAGGAACAUUU | 834 |
| D-1335 | [INVAB]AUGUUCCUGCUUCAUGCCUUU | 835 | AAAGGCAUGAAGCAGGAACAUUU | 836 |
| D-1336 | [INVAB]GUUCCUGCUUCAUGCCUUUUU | 837 | AAAGGCAUGAAGCAGGAACUU | 838 |
| D-1337 | AUGUUCCUGCUUCAUGCCUU{INVAB} | 839 | AAAGGCAUGAAGCAGGAACAUUU | 840 |
| D-1338 | [INVAB]AUGUUCCUGCUUCAUGCCUUU | 841 | AAAGGCAUGAAGCAGGAACAUUU | 842 |
| D-1339 | [INVAB]AUGUUCCUGCUUCAUGCCUUU | 843 | AAAGGCAUGAAGCAGGAACAUUU | 844 |
| D-1340 | [INVAB]AUGUUCCUGCUUCAUGCCUUU | 845 | AAAGGCAUGAAGCAGGAACAUUU | 846 |
| D-1341 | [INVAB]GCUUCAUGCCUUUCUACAGUA | 847 | UACUGUAGAAAGGCAUGAAGCUU | 848 |
| D-1342 | [INVAB]GCUUCAUGCCUUUCUACAGUA | 849 | UACUGUAGAAAGGCAUGAAGCUU | 850 |
| D-1343 | [INVAB]UUCAUGCCUUUCUACAGUAUU | 851 | UACUGUAGAAAGGCAUGAAUU | 852 |
| D-1344 | [INVAB]GCUUCAUGCCUUUCUACAGUA | 853 | UACUGUAGAAAGGCAUGAAGCUU | 854 |
| D-1345 | GCUUCAUGCCUUUCUACAGU{INVAB} | 855 | UACUGUAGAAAGGCAUGAAGCUU | 856 |
| D-1346 | [INVAB]GCGGCUUCCUGGGCUUCUAUU | 857 | UAGAAGCCCAGGAAGCCGCUU | 858 |
| D-1347 | [INVAB]AUGGCUUCCAGAUAUGCCUUU | 859 | AGGCAUAUCUGGAAGCCAUUU | 860 |
| D-1348 | [INVAB]ACAUGGCUUCCAGAUAUGCCU | 861 | AGGCAUAUCUGGAAGCCAUGUUU | 862 |
| D-1349 | [INVAB]ACAUGGCUUCCAGAUAUGCCU | 863 | AGGCAUAUCUGGAAGCCAUGUUU | 864 |
| D-1350 | [INVAB]CAACGUACCCUUCAUUGAUGU | 865 | ACAUCAAUGAAGGGUACGUUGUU | 866 |
| D-1351 | [INVAB]CAACGUACCCUUCAUUGAUGU | 867 | ACAUCAAUGAAGGGUACGUUGUU | 868 |
| D-1352 | [INVAB]ACGUACCCUUCAUUGAUGUUU | 869 | ACAUCAAUGAAGGGUACGUUU | 870 |
| D-1353 | CUGCUUCAUGCCUUUCUACA{INVAB} | 871 | AUGUAGAAAGGCAUGAAGCAGUU | 872 |
| D-1354 | [INVAB]CUGCUUCAUGCCUUUCUACAU | 873 | AUGUAGAAAGGCAUGAAGCAGUU | 874 |
| D-1355 | [INVAB]GCUUCAUGCCUUUCUACAUUU | 875 | AUGUAGAAAGGCAUGAAGCUU | 876 |
| D-1356 | CUGCUUCAUGCCUUUCUACA{INVAB} | 877 | AUGUAGAAAGGCAUGAAGCAGUU | 878 |
| D-1357 | [INVAB]CUGCUUCAUGCCUUUCUACAU | 879 | AUGUAGAAAGGCAUGAAGCAGUU | 880 |
| D-1358 | CUGCUUCAUGCCUUUCUACA{INVAB} | 881 | AUGUAGAAAGGCAUGAAGCAGUU | 882 |
| D-1359 | [INVAB]CUGCUUCAUGCCUUUCUACA | 883 | AUGUAGAAAGGCAUGAAGCAGUU | 884 |
| | {INVAB} | | | |
| D-1360 | [INVAB]GCUUCAUGCCUUUCUACAUUU | 885 | AUGUAGAAAGGCAUGAAGCUU | 886 |
| D-1361 | [INVAB]CUUCAUGCCUUUCUACAGUUU | 887 | ACUGUAGAAAGGCAUGAAGUU | 888 |
| D-1362 | UGCUUCAUGCCUUUCUACAG{INVAB} | 889 | ACUGUAGAAAGGCAUGAAGCAUU | 890 |
| D-1363 | [INVAB]CUGCUUCAUGCCUUUCUACAU | 891 | AUGUAGAAAGGCAUGAAGCAGUU | 892 |
| D-1364 | CUGCUUCAUGCCUUUCUACA{INVAB} | 893 | AUGUAGAAAGGCAUGAAGCAGUU | 894 |
| D-1365 | CUGCUUCAUGCCUUUCUACA{INVAB} | 895 | AUGUAGAAAGGCAUGAAGCAGUU | 896 |
| D-1366 | [INVAB]CUUCAUCCCUUUCUACAGUUU | 897 | ACUGUAGAAAGGGAUGAAGUU | 898 |
| D-1367 | [INVAB]GCUUCAUCCCUUUCUACAUUU | 899 | AUGUAGAAAGGGAUGAAGCUU | 900 |
| D-1368 | UGCUUCAUCCCUUUCUACAG{INVAB} | 901 | ACUGUAGAAAGGGAUGAAGCAUU | 902 |
| D-1369 | CUGCUUCAUCCCUUUCUACA{INVAB} | 903 | AUGUAGAAAGGGAUGAAGCAGUU | 904 |
| D-1370 | [INVAB]ACAUUGCUCUUUCACCUGAUU | 905 | UCAGGUGAAAGAGCAAUGUUU | 906 |
| D-1371 | CUGCUUCAUGCCUUUCUACA{INVAB} | 907 | AUGUAGAAAGGCAUGAAGCAGUU | 908 |
| D-1372 | CUGCUUCAUGCCUUUCUACA{INVAB} | 909 | AUGUAGAAAGGCAUGAAGCAGUU | 910 |
| D-1373 | CUGCUUCAUGCCUUUCUACA{INVAB} | 911 | AUGUAGAAAGGCAUGAAGCAGUU | 912 |
| D-1374 | CUGCUUCAUGCCUUUCUACA{INVAB} | 913 | AUGUAGAAAGGCAUGAAGCAGUU | 914 |
| D-1375 | CUGCUUCAUGCCUUUCUACA{INVAB} | 915 | AUGUAGAAAGGCAUGAAGCAGUU | 916 |
| D-1376 | CUGCUUCAUGCCUUUCUACA{INVAB} | 917 | AUGUAGAAAGGCAUGAAGCAGUU | 918 |
| D-1377 | CUGCUUCAUGCCUUUCUACA{INVAB} | 919 | AUGUAGAAAGGCAUGAAGCAGUU | 920 |
| D-1378 | CUGCUUCAUGCCUUUCUACA{INVAB} | 921 | AUGUAGAAAGGCAUGAAGCAGUU | 922 |
| D-1379 | CUGCUUCAUGCCUUUCUACA{INVAB} | 923 | AUGUAGAAAGGCAUGAAGCAGUU | 924 |
| D-1380 | CUGCUUCAUGCCUUUCUACA{INVAB} | 925 | AUGUAGAAAGGCAUGAAGCAGUU | 926 |
| D-1381 | CUGCUUCAUGCCUUUCUACA{INVAB} | 927 | AUGUAGAAAGGCAUGAAGCAGUU | 928 |
| D-1381 | [INVAB]CUUCAUGCC[DT]UUCUACAGUUU | 929 | ACUGUAGAAAGGCAUGAAGUU | 930 |
| D-1382 | [INVAB]CUUCAUGCCUUUCUACAGUUU | 931 | ACUGUAGAAAGGCAUGAAGUU | 932 |
| D-1383 | [INVAB]CUUCAUGCCUUUCUACAGUUU | 933 | ACUGUAGAAAGGCAUGAAGUU | 934 |
| D-1384 | [INVAB]CUUCAUGCCUUUCUACAGUUU | 935 | ACUGUAGAAAGGCAUGAAGUU | 936 |
| D-1385 | [INVAB]CUUCAUGCCUUUCUACAGUUU | 937 | ACUGUAGAAAGGCAUGAAGUU | 938 |
| D-1386 | [INVAB]CUUCAUGC[DC]UUUCUACAGUUU | 939 | ACUGUAGAAAGGCAUGAAGUU | 940 |
| D-1387 | [INVAB]CUUCAUGCCU[DT]UCUACAGUUU | 941 | ACUGUAGAAAGGCAUGAAGUU | 942 |
| D-1388 | [INVAB]GCUUCAUGGGAUUCUACAUUU | 943 | AUGUAGAAUCCCAUGAAGCUU | 944 |
| D-1389 | [INVAB]CUUCAUGCGAAUCUACAGUUU | 945 | ACUGUAGAUUCGCAUGAAGUU | 946 |
| D-1390 | CUGCUUCAUGCCUUUCUACA{INVAB} | 947 | UUGUAGAAAGGCAUGAAGCAGUU | 948 |
| D-1391 | [INVAB]CUGCUUCAUGCCUUUCUACAA | 949 | UUGUAGAAAGGCAUGAAGCAGUU | 950 |
| D-1392 | CUGCUUCAUGCCUUUCUACA{INVDA} | 951 | UUGUAGAAAGGCAUGAAGCAGUU | 952 |
| D-1393 | CUGCUUCAUGGGAUUCUACA{INVAB} | 953 | AUGUAGAAUCCCAUGAAGCAGUU | 954 |
| D-1394 | [INVAB]CUGCUUCAUGGGAUUCUACAU | 955 | AUGUAGAAUCCCAUGAAGCAGUU | 956 |
| D-1395 | [INVAB]CUUCAUGCCUUUCUACAGUUU | 957 | ACUGUAGAAAGGCAUGAAGUU | 958 |
| D-1396 | [INVAB]CUUCAUGCCUUUCUACAGUUU | 959 | ACUGUAGAAAGGCAUGAAGUU | 960 |
| D-1397 | [INVAB]GCUUCAUGCCUUUCUACAUUU | 961 | AUGUAGAAAGGCAUGAAGCUU | 962 |
| D-1398 | [INVAB]UGCUUCAUGCCUUUCUACAG | 963 | ACUGUAGAAAGGCAUGAAGCAUU | 964 |
| | {INVAB} | | | |
| D-1399 | [INVAB]CUUCAUGCCUUUCUACAGUUU | 965 | ACUGUAGAAAGGCAUGAAGUU | 966 |
| D-1400 | UGCUUCAUGCCUUUCUACAG{INVAB} | 967 | ACUGUAGAAAGGCAUGAAGCAUU | 968 |
| D-1401 | UGCUUCAUGCCUUUCUACAG{INVAB} | 969 | ACUGUAGAAAGGCAUGAAGCAUU | 970 |
| D-1402 | UGCUUCAUGCCUUUCUACAG{INVAB} | 971 | ACUGUAGAAAGGCAUGAAGCAUU | 972 |
| D-1403 | [INVAB]CUUCAUGCCUUUCUACAGUUU | 973 | ACUGUAGAAAGGCAUGAAGUU | 974 |
| D-1404 | UGCUUCAUGCCUUUCUACAG{INVAB} | 975 | ACUGUAGAAAGGCAUGAAGCAUU | 976 |
| D-1405 | AUGCCUUUCUACAGUGGCUU{INVAB} | 977 | AGCCACUGUAGAAAGGCAUGAUU | 978 |
| D-1406 | UCAUGCCUUUCUACAGUGGC{INVAB} | 979 | AGCCACUGUAGAAAGGCAUGAUU | 980 |
| D-1407 | [INVAB]AUGCCUUUCUACAGUGGCUUU | 981 | AGCCACUGUAGAAAGGCAUUU | 982 |
| D-1408 | [INVAB]AUGCCUUUCUACAGUGGCUUU | 983 | AGCCACUGUAGAAAGGCAUUU | 984 |
| D-1409 | [INVAB]UCAUGCCUUUCUACAGUGGCU | 985 | AGCCACUGUAGAAAGGCAUGAUU | 986 |
| D-1410 | UCAUGCCUUUCUACAGUGGC{INVAB} | 987 | AGCCACUGUAGAAAGGCAUGAUU | 988 |
| D-1411 | [INVAB]AUGCCUUUCUACAGUGGCUUU | 989 | AGCCACUGUAGAAAGGCAUUU | 990 |
| D-1412 | UCAUGCCUUUCUACAGUGGC{INVAB} | 991 | AGCCACUGUAGAAAGGCAUGAUU | 992 |
| D-1413 | UCAUGCCUUUCUACAGUGGC{INVAB} | 993 | AGCCACUGUAGAAAGGCAUGAUU | 994 |
| D-1414 | [INVAB]UCAUGCCUUUCUACAGUGGC | 995 | AGCCACUGUAGAAAGGCAUGAUU | 996 |
| | {INVAB} | | | |
| D-1415 | [INVAB]AUGCCUUUCUACAGUGGCAUU | 997 | UGCCACUGUAGAAAGGCAUUU | 998 |
| D-1416 | UCAUGCCUUUCUACAGUGGC{INVAB} | 999 | UGCCACUGUAGAAAGGCAUGAUU | 1000 |
| D-1417 | [INVAB]UCAUGCCUUUCUACAGUGGCA | 1001 | UGCCACUGUAGAAAGGCAUGAUU | 1002 |
| D-1418 | UCAUGCCUUUCUACAGUGGC{INVDA} | 1003 | UGCCACUGUAGAAAGGCAUGAUU | 1004 |
| D-1419 | CUGCUUCAUGCCUUUCUACA{INVAB} | 1005 | AUGUAGAAAGGCAUGAAGCAGUU | 1006 |
| D-1420 | CUGCUUCAUGCCUUUCUACA{INVAB} | 1007 | UUGUAGAAAGGCAUGAAGCAGUU | 1008 |
| D-1421 | CUGCUUCAUGCCUUUCUACA{INVDA} | 1009 | UUGUAGAAAGGCAUGAAGCAGUU | 1010 |
| D-1422 | UCAUGCCUUUCUACAGUGGC{INVAB} | 1011 | UGCCACUGUAGAAAGGCAUGAUU | 1012 |
| D-1423 | UCAUGCCUUUCUACAGUGGC{INVDA} | 1013 | UGCCACUGUAGAAAGGCAUGAUU | 1014 |
| D-1424 | [INVAB]CUUCAUGCCUUUCUACAGUUU | 1015 | ACUGUAGAAAGGCAUGAAGUU | 1016 |
| D-1425 | CUGCUUCAUGCCUUUCUACA{INVAB} | 1017 | AUGUA[AB]AAAGGCAUGAAGCAGUU | 1018 |
| D-1426 | CUGCUUCAUGCCUUUCUACA{INVAB} | 1019 | AUGUA[AB]AAAGGCAUGAAGCAGUU | 1020 |
| D-1427 | UGCUUCAUGCCUUUCUACAG{INVAB} | 1021 | ACUGU[AB]GAAAGGCAUGAAGCAUU | 1022 |
| D-1428 | UGCUUCAUGCCUUUCUACAG{INVAB} | 1023 | ACUGU[AB]GAAAGGCAUGAAGCAUU | 1024 |
| D-1429 | UCAUGCCUUUCUACAGUGGC{INVAB} | 1025 | AGCCA[AB]UGUAGAAAGGCAUGAUU | 1026 |
| D-1430 | UCAUGCCUUUCUACAGUGGC{INVAB} | 1027 | AGCCA[AB]UGUAGAAAGGCAUGAUU | 1028 |
| D-1431 | CUGCUUCAUGCCUUUCUACA{INVAB} | 1029 | AU[GNA-G]UAGAAAGGCAUGAAGCAGUU | 1030 |
| D-1432 | CUGCUUCAUGCCUUUCUACA{INVAB} | 1031 | AUG[GNA-U]AGAAAGGCAUGAAGCAGUU | 1032 |
| D-1433 | CUGCUUCAUGCCUUUCUACA{INVAB} | 1033 | AUGU[GNA-A]GAAAGGCAUGAAGCAGUU | 1034 |
| D-1434 | CUGCUUCAUGCCUUUCUACA{INVAB} | 1035 | AUGUA[GNA-G]AAAGGCAUGAAGCAGUU | 1036 |
| D-1435 | CUGCUUCAUGCCUUUCUACA{INVAB} | 1037 | AUGUAG[GNA-A]AAGGCAUGAAGCAGUU | 1038 |
| D-1436 | CUGCUUCAUGCCUUUCUACA{INVAB} | 1039 | AUGUAGA[GNA-A]AGGCAUGAAGCAGUU | 1040 |
| D-1437 | CUGCUUCAUGCCUUUCUACA{INVAB} | 1041 | AUGUAGAAAGGCAUGAAGCAGUU | 1042 |
| D-1438 | [INVAB]CUGCUUCAUGCCUUUCUACAU | 1043 | AUGUAGAAAGGCAUGAAGCAGUU | 1044 |
| D-1439 | [INVAB]CUGCUUCAUGCCUUUCUACA | 1045 | AUGUAGAAAGGCAUGAAGCAGUU | 1046 |
| | {INVAB} | | | |
| D-1440 | CUGCUUCAUGCCUUUCUACA{INVAB} | 1047 | AUGUAGAAAGGCAUGAAGCAGUU | 1048 |
| D-1441 | CUGCUUCAUGCCUUUCUACA{INVAB} | 1049 | AUGUAGAAAGGCAUGAAGCAGUU | 1050 |
| D-1442 | [INVAB]CUGCUUCAUGCCUUUCUACAU | 1051 | AUGUAGAAAGGCAUGAAGCAGUU | 1052 |
| D-1443 | CUGCUUCAUGCCUUUCUACA{INVAB} | 1053 | AUGUAGAAAGGCAUGAAGCAGUU | 1054 |
| D-1444 | CUGCUUCAUGCCUUUCUACA{INVAB} | 1055 | AUGUAGAAAGGCAUGAAGCAGUU | 1056 |
| D-1445 | [INVAB]CUGCUUCAUGCCUUUCUACAU | 1057 | AUGUAGAAAGGCAUGAAGCAGUU | 1058 |
| D-1446 | [INVAB]CUGCUUCAUGCCUUUCUACA | 1059 | AUGUAGAAAGGCAUGAAGCAGUU | 1060 |
| | {INVAB} | | | |
| D-1447 | CUGCUUCAUGCCUUUCUACA{INVAB} | 1061 | A[AB]GUAGAAAGGCAUGAAGCAGUU | 1062 |
| D-1448 | CUGCUUCAUGCCUUUCUACA{INVAB} | 1063 | AU[AB]UAGAAAGGCAUGAAGCAGUU | 1064 |
| D-1449 | CUGCUUCAUGCCUUUCUACA{INVAB} | 1065 | AUG[AB]AGAAAGGCAUGAAGCAGUU | 1066 |
| D-1450 | CUGCUUCAUGCCUUUCUACA{INVAB} | 1067 | AUGU[AB]GAAAGGCAUGAAGCAGUU | 1068 |
| D-1451 | CUGCUUCAUGCCUUUCUACA{INVAB} | 1069 | AUGUAG[AB]AAGGCAUGAAGCAGUU | 1070 |
| D-1452 | CUGCUUCAUGCCUUUCUACA{INVAB} | 1071 | AUGUAGA[AB]AGGCAUGAAGCAGUU | 1072 |
| D-1453 | CAACGUACCCUUCAUUGAUG{INVAB} | 1073 | ACAUCAAUGAAGGGUACGUUGUU | 1074 |
| D-1454 | CAACGUACCCUUCAUUGAUG{INVAB} | 1075 | ACAUCAAUGAAGGGUACGUUGUU | 1076 |
| D-1455 | ACAUGGCUUCCAGAUAUGCC{INVAB} | 1077 | AGGCAUAUCUGGAAGCCAUGUUU | 1078 |
| D-1456 | ACAUGGCUUCCAGAUAUGCC{INVAB} | 1079 | AGGCAUAUCUGGAAGCCAUGUUU | 1080 |
| D-1457 | CUGCUUCAUGCCUUUCUACA{INVAB} | 1081 | AUGUAGAAAGGCAUGAAGCAGUU | 1082 |
| D-1458 | CUGCUUCAUGCCUUUCUACA{INVAB} | 1083 | AUGUAGAAAGGCAUGAAGCAGUU | 1084 |
| D-1459 | CUGCUUCAUGCCUUUCUACA{INVAB} | 1085 | AUGUAGAAAGGCAUGAAGCAGUU | 1086 |
| D-1460 | CUGCGGCUUCCUGGGCUUCU{INVAB} | 1087 | UAGAAGCCCAGGAAGCCGCAGUU | 1088 |
| D-1461 | CUGCGGCUUCCUGGGCUUCU{INVAB} | 1089 | UAGAAGCCCAGGAAGCCGCAGUU | 1090 |
| D-1462 | UGCUUCAUGCCUUUCUACAG{INVAB} | 1091 | ACUGUAGAAAGGCAUGAAGCAUU | 1092 |
| D-1463 | [INVAB]UGCUUCAUGCCUUUCUACAGU | 1093 | ACUGUAGAAAGGCAUGAAGCAUU | 1094 |
| D-1464 | [INVAB]UGCUUCAUGCCUUUCUACAG | 1095 | ACUGUAGAAAGGCAUGAAGCAUU | 1096 |
| | {INVAB} | | | |
| D-1465 | UGCUUCAUGCCUUUCUACAG{INVAB} | 1097 | ACUGUAGAAAGGCAUGAAGCAUU | 1098 |
| D-1466 | UGCUUCAUGCCUUUCUACAG{INVAB} | 1099 | ACUGUAGAAAGGCAUGAAGCAUU | 1100 |
| D-1467 | UGCUUCAUGCCUUUCUACAG{INVAB} | 1101 | ACUGUAGAAAGGCAUGAAGCAUU | 1102 |
| D-1468 | CUGCUUCAUGCCUUUCUACAU | 1103 | AUGUAGAAAGGCAUGAAGCAGUU | 1104 |
| D-1469 | CUGCUUCAUGCCUUUCUACAU | 1105 | AUGUAGAAAGGCAUGAAGCAGUU | 1106 |
| D-1470 | CUGCUUCAUGCCUUUCUACAU | 1107 | AUGUAGAAAGGCAUGAAGCAGUU | 1108 |
| D-1471 | UGCUUCAUGCCUUUCUACAG{INVAB} | 1109 | UCUGUAGAAAGGCAUGAAGCAUU | 1110 |
| D-1472 | UGCUUCAUGCCUUUCUACAG{INVDA} | 1111 | UCUGUAGAAAGGCAUGAAGCAUU | 1112 |
| D-1473 | CUGCUUCAUGCCUUUCUACA{INVDT} | 1113 | AUGUAGAAAGGCAUGAAGCAGUU | 1114 |
| D-1474 | CUGCUUCAUGCCUUUCUACA{INVAB} | 1115 | AUGUAGA[GNA-A]AGGCAUGAAGCAGUU | 1116 |
| D-1475 | CUGCUUCAUGCCUUUCUACA{INVAB} | 1117 | AUGUAGA[GNA-A]AGGCAUGAAGCAGUU | 1118 |
| D-1476 | CUGCUUCAUGCCUUUCUACA{INVAB} | 1119 | AUGUAGA[GNA-A]AGGCAUGAAGCAGUU | 1120 |
| D-1477 | CUGCUUCAUGCCUUUCUACA{INVAB} | 1121 | AUGUAGA[GNA-A]AGGCAUGAAGCAGUU | 1122 |
| D-1478 | CUGCUUCAUGCCUUUCUACA{INVAB} | 1123 | AUGUAGA[GNA-A]AGGCAUGAAGCAGUU | 1124 |
| D-1479 | CUGCUUCAUGCCUUUCUACA{INVAB} | 1125 | AUGUAGA[GNA-A]AGGCAUGAAGCAGUU | 1126 |
| D-1480 | CUGCUUCAUGCCUUUCUACA{INVAB} | 1127 | AUGUAGA[GNA-A]AGGCAUGAAGCAGUU | 1128 |
| D-1481 | CUGCUUCAUGCCUUUCUACA{INVAB} | 1129 | AUGUAGA[GNA-A]AGGCAUGAAGCAGUU | 1130 |
| D-1482 | CUGCUUCAUGCCUUUCUACA{INVAB} | 1131 | AUGUAGA[GNA-A]AGGCAUGAAGCAGUU | 1132 |
| D-1483 | CUGCUUCAUGCCUUUCUACA{INVAB} | 1133 | AUGUAGA[GNA-A]AGGCAUGAAGCAGUU | 1134 |
| D-1484 | CUGCUUCAUGCCUUUCUACA{INVAB} | 1135 | AUGUAGA[GNA-A]AGGCAUGAAGCAGUU | 1136 |
| D-1485 | CUGCUUCAUGCCUUUCUACA{INVAB} | 1137 | AUGUAGA[GNA-A]AGGCAUGAAGCAGUU | 1138 |
| D-1486 | CUGCUUCAUGCCUUUCUACA{INVAB} | 1139 | AUGUAGA[GNA-A]AGGCAUGAAGCAGUU | 1140 |
| D-1487 | CUGCUUCAUGCCUUUCUACA{INVAB} | 1141 | AUGUAGA[GNA-A]AGGCAUGAAGCAGUU | 1142 |
| D-1488 | CUGCUUCAUGCCUUUCUACA{INVAB} | 1143 | AUGUAGA[GNA-A]AGGCAUGAAGCAGUU | 1144 |
| D-1489 | CUGCUUCAUGCCUUUCUACA{INVAB} | 1145 | AUGUAGA[GNA-A]AGGCAUGAAGCAGUU | 1146 |
| D-1490 | CUGCUUCAUGCCUUUCUACA{INVAB} | 1147 | AUGUAGA[GNA-A]AGGCAUGAAGCAGUU | 1148 |
| D-1491 | CUGCUUCAUGCCUUUCUACA{INVAB} | 1149 | AUGUAGA[GNA-A]A[DG]GCAUGAAGCAGUU | 1150 |
| D-1492 | CUGCUUCAUGCCUUUCUACA{INVAB} | 1151 | AUGUAGA[GNA-A][DA]GGCAUGAAGCAGUU | 1152 |
| D-1493 | CUGCUUCAUGCCUUUCUACA{INVAB} | 1153 | AUGUAGA[GNA-A]AG[DG]CAUGAAGCAGUU | 1154 |
| D-1494 | CUGCUUCAUGCCUUUCUACA{INVAB} | 1155 | AUGUAGA[GNA-A]AGGCAUGAAGCAGUU | 1156 |
| D-1495 | CUGCUUCAUGCCUUUCUACA{INVAB} | 1157 | AUGUAGA[GNA-A]AGGCAUGAAGCAGUU | 1158 |
| D-1496 | CUGCUUCAUGCCUUUCUACA{INVAB} | 1159 | AUGUAGA[GNA-A]AGGCAUGAAGCAGUU | 1160 |
| D-1497 | CUGCUUCAUGCCUUUCUACA{INVAB} | 1161 | AUGUAGA[GNA-A]AGGCAUGAAGCAGUU | 1162 |
| D-1498 | CUGCUUCAUGCCUUUCUACA{INVAB} | 1163 | AUGUAGA[GNA-A]AGGCAUGAAGCAGUU | 1164 |
| D-1499 | CUGCUUCAUGCCUUUCUACA{INVAB} | 1165 | AUGUAGA[GNA-A]AGGCAUGAAGCAGUU | 1166 |
| D-1500 | CUGCUUCAUGCCUUUCUACA{INVAB} | 1167 | AUGUAGAAAGGCAUGAAGCAGUU | 1168 |
| D-1501 | UGCUUCAUGCCUUUCUACAG{INVDA} | 1169 | U[GNA-C]UGUAGAAAGGCAUGAAGCAUU | 1170 |
| D-1502 | UGCUUCAUGCCUUUCUACAG{INVDA} | 1171 | UC[GNA-U]GUAGAAAGGCAUGAAGCAUU | 1172 |
| D-1503 | UGCUUCAUGCCUUUCUACAG{INVDA} | 1173 | UCUG[GNA-U]AGAAAGGCAUGAAGCAUU | 1174 |
| D-1504 | UGCUUCAUGCCUUUCUACAG{INVDA} | 1175 | UCUGU[GNA-A]GAAAGGCAUGAAGCAUU | 1176 |
| D-1505 | UGCUUCAUGCCUUUCUACAG{INVDA} | 1177 | UCUGUAG[GNA-A]AAGGCAUGAAGCAUU | 1178 |
| D-1506 | UGCUUCAUGCCUUUCUACAG{INVDA} | 1179 | U[AB]UGUAGAAAGGCAUGAAGCAUU | 1180 |
| D-1507 | UGCUUCAUGCCUUUCUACAG{INVDA} | 1181 | UC[AB]GUAGAAAGGCAUGAAGCAUU | 1182 |
| D-1508 | UGCUUCAUGCCUUUCUACAG{INVDA} | 1183 | UCU[AB]UAGAAAGGCAUGAAGCAUU | 1184 |
| D-1509 | UGCUUCAUGCCUUUCUACAG{INVDA} | 1185 | UCUG[AB]AGAAAGGCAUGAAGCAUU | 1186 |
| D-1510 | UGCUUCAUGCCUUUCUACAG{INVDA} | 1187 | UCUGU[AB]GAAAGGCAUGAAGCAUU | 1188 |
| D-1511 | UGCUUCAUGCCUUUCUACAG{INVDA} | 1189 | UCUGUA[AB]AAAGGCAUGAAGCAUU | 1190 |
| D-1512 | UGCUUCAUGCCUUUCUACAG{INVDA} | 1191 | UCUGUAG[AB]AAGGCAUGAAGCAUU | 1192 |
| D-1513 | UCAUGCCUUUCUACAGUGGC{INVDT} | 1193 | AGCCACUGUAGAAAGGCAUGAUU | 1194 |
| D-1514 | UCAUGCCUUUCUACAGUGGC{INVAB} | 1195 | UGCCACUGUAGAAAGGCAUGAUU | 1196 |
| D-1515 | UCAUGCCUUUCUACAGUGGC{INVDA} | 1197 | UGCCACUGUAGAAAGGCAUGAUU | 1198 |
| D-1516 | UCCUGCUUCAUGCCUUUCUA{INVDT} | 1199 | AUAGAAAGGCAUGAAGCAGGAUU | 1200 |
| D-1517 | UCCUGCUUCAUGCCUUUCUA{INVAB} | 1201 | UUAGAAAGGCAUGAAGCAGGAUU | 1202 |
| D-1518 | UCCUGCUUCAUGCCUUUCUA{INVDA} | 1203 | UUAGAAAGGCAUGAAGCAGGAUU | 1204 |
| D-1519 | UAUGUUCCUGCUUCAUGCCU{INVDT} | 1205 | AAGGCAUGAAGCAGGAACAUAUU | 1206 |
| D-1520 | UAUGUUCCUGCUUCAUGCCU{INVAB} | 1207 | UAGGCAUGAAGCAGGAACAUAUU | 1208 |
| D-1521 | UAUGUUCCUGCUUCAUGCCU{INVDA} | 1209 | UAGGCAUGAAGCAGGAACAUAUU | 1210 |
| D-1522 | UCCUGCUUCAUGCCUUUCUA{INVAB} | 1211 | AUAGAAAGGCAUGAAGCAGGAUU | 1212 |
| D-1523 | UAUGUUCCUGCUUCAUGCCU{INVAB} | 1213 | AAGGCAUGAAGCAGGAACAUAUU | 1214 |
| D-1524 | UCAUGCCUUUCUACAGUGGC{INVDT} | 1215 | AGCCACUGUAGAAAGGCAUGAUU | 1216 |
| D-1525 | UCCUGCUUCAUGCCUUUCUA{INVDT} | 1217 | AUAGAAAGGCAUGAAGCAGGAUU | 1218 |
| D-1526 | UCCUGCUUCAUGCCUUUCUA{INVDA} | 1219 | UUAGAAAGGCAUGAAGCAGGAUU | 1220 |
| D-1527 | UAUGUUCCUGCUUCAUGCCU{INVDA} | 1221 | UAGGCAUGAAGCAGGAACAUAUU | 1222 |
| D-1528 | UGCUUCAUGCCUUUCUACAG{INVDA} | 1223 | UCUGUA[GNA-G]AAAGGCAUGAAGCAUU | 1224 |
| D-1529 | CUGCUUCAUGCCUUUCUACA{INVAB} | 1225 | AUGUAGA[GNA-A]AGGCAUGAAGCAGUU | 1226 |
| D-1530 | CUGCUUCAUGCCUUUCUACA{INVAB} | 1227 | AUGUAGA[GNA-A]AGGCAUGAAGCAGUU | 1228 |
| D-1531 | CUGCUUCAUGCCUUUCUACA{INVAB} | 1229 | AUGUAGA[GNA-A]AGGCAUGAAGCAGUU | 1230 |
| D-1532 | CUGCUUCAUGCCUUUCUACA{INVAB} | 1231 | AUGUAGA[GNA-A]AGGCAUGAAGCAGUU | 1232 |
| D-1533 | CUGCUUCAUGCCUUUCUACA{INVAB} | 1233 | AUGUAGA[GNA-A]AGGCAUGAAGCAGUU | 1234 |
| D-1534 | CUGCUUCAUGCCUUUCUACA{INVAB} | 1235 | AUGUAGA[GNA-A]AGGCAUGAAGCAGUU | 1236 |
| D-1535 | CUGCUUCAUGCCUUUCUACA{INVAB} | 1237 | AUGUAGA[GNA-A]AGGCAUGAAGCAGUU | 1238 |
| D-1536 | CUGCUUCAUGCCUUUCUACA{INVAB} | 1239 | AUGUAGA[GNA-A]AGGCAUGAAGCAGUU | 1240 |
| D-1537 | CUGCUUCAUGCCUUUCUACA{INVAB} | 1241 | AUGUAGA[GNA-A]AGGCAUGAAGCAGUU | 1242 |
| D-1538 | CUGCUUCAUGCCU[LNA- | 1243 | AUGUAGA[GNA-A]AGGCAUGAAGCAGUU | 1244 |
| | T]UCUACA{INVAB} | | | |
| D-1539 | CUGCUUCAUGCC[LNA- | 1245 | AUGUAGA[GNA-A]AGGCAUGAAGCAGUU | 1246 |
| | T]UUCUACA{INVAB} | | | |
| D-1540 | CUGCUUCAUGCCUU[LNA- | 1247 | AUGUAGA[GNA-A]AGGCAUGAAGCAGUU | 1248 |
| | T]CUACA{INVAB} | | | |
| D-1541 | CUGCUUCAUGCCUUUC[LNA- | 1249 | AUGU[GNA-A]GAAAGGCAUGAAGCAGUU | 1250 |
| | T]ACA{INVAB} | | | |
| D-1542 | CUGCUUCAUGCCUUUCU[LNA- | 1251 | AUG[GNA-U]AGAAAGGCAUGAAGCAGUU | 1252 |
| | A]CA{INVAB} | | | |
| D-1543 | CUGCUUCAUGCCUUUCUAC[LNA- | 1253 | A[GNA-U]GUAGAAAGGCAUGAAGCAGUU | 1254 |
| | A]{INVAB} | | | |
| D-1544 | CUGCUUCAUGCCUU[LNA- | 1255 | AUGUAG[AB]AAGGCAUGAAGCAGUU | 1256 |
| | T]CUACA{INVAB} | | | |
| D-1545 | CUGCUUCAUGCCUUUC[LNA- | 1257 | AUGU[AB]GAAAGGCAUGAAGCAGUU | 1258 |
| | T]ACA{INVAB} | | | |
| D-1546 | CUGCUUCAUGCCUUUCU[LNA- | 1259 | AUG[AB]AGAAAGGCAUGAAGCAGUU | 1260 |
| | A]CA{INVAB} | | | |
| D-1547 | CUGCUUCAUGCCUUUCUACA{INVAB} | 1261 | AUGUAGA[GNA-A]AGGCAUGAAGCAGUU | 1262 |
| D-1548 | CUGCUUCAUGCCUUUCUACA{INVAB} | 1263 | AUGUAGA[GNA-A]AGGCAUGAAGCAGUU | 1264 |
| D-1549 | CUGCUUCAUGCCU[LNA- | 1265 | AUGUAGA[GNA-A]AGGCAUGAAGCAGUU | 1266 |
| | T]UCUACA{INVAB} | | | |
| D-1550 | CUGCUUCAUGCCU[LNA- | 1267 | AUGUAGA[GNA-A]AGGCAUGAAGCAGUU | 1268 |
| | T]UCUACA{INVAB} | | | |
| D-1551 | CUGCUUCAUGCCU[LNA- | 1269 | AUGUAGA[GNA-A]AGGCAUGAAGCAGUU | 1270 |
| | T]UCUACA{INVAB} | | | |
| D-1552 | CUGCUUCAUGCCU[LNA- | 1271 | AUGUAGA[GNA-A]AGGCAUGAAGCAGUU | 1272 |
| | T]UCUACA{INVAB} | | | |
| D-1553 | UGCUUCAUGCCUUUCU[LNA- | 1273 | UCUG[AB]AGAAAGGCAUGAAGCAUU | 1274 |
| | A]CAG{INVDA} | | | |
| D-1554 | UGCUUCAUGCCUUUC[LNA- | 1275 | UCUGU[AB]GAAAGGCAUGAAGCAUU | 1276 |
| | T]ACAG{INVDA} | | | |
| D-1555 | UGCUUCAUGCCUU[LNA- | 1277 | UCUGUAG[AB]AAGGCAUGAAGCAUU | 1278 |
| | T]CUACAG{INVDA} | | | |
| D-1556 | UGCUUCAUGCCUUUCUAC[LNA- | 1279 | UC[GNA-U]GUAGAAAGGCAUGAAGCAUU | 1280 |
| | A]G{INVDA} | | | |
| D-1557 | UGCUUCAUGCCUUUCU[LNA- | 1281 | UCUG[GNA-U]AGAAAGGCAUGAAGCAUU | 1282 |
| | A]CAG{INVDA} | | | |
| D-1558 | UGCUUCAUGCCUUUC[LNA- | 1283 | UCUGU[GNA-A]GAAAGGCAUGAAGCAUU | 1284 |
| | T]ACAG{INVDA} | | | |
| D-1559 | UGCUUCAUGCCUUUCUACA[LNA- | 1285 | U[AB]UGUAGAAAGGCAUGAAGCAUU | 1286 |
| | G]{INVDA} | | | |
| D-1560 | UGCUUCAUGCCUUUCUAC[LNA- | 1287 | UC[AB]GUAGAAAGGCAUGAAGCAUU | 1288 |
| | A]G{INVDA} | | | |
| D-1561 | UCAUGCCUUUCUACA[LNA- | 1289 | AGCCA[AB]UGUAGAAAGGCAUGAUU | 1290 |
| | G]UGGC{INVAB} | | | |
| D-1562 | UCAUGCCUUUCUACAG[LNA- | 1291 | AGCCA[AB]UGUAGAAAGGCAUGAUU | 1292 |
| | T]GGC{INVAB} | | | |
| D-1563 | UCAUGCCUUUCUACAGUGGC{INVAB} | 1293 | AGCCA[AB]UGUAGAAAGGCAUGAUU | 1294 |
| D-1564 | GGUAUGUUCCUGCUUCAUUUU | 2257 | AAUGAAGCAGGAACAUACCUU | 2258 |
| D-1565 | GGUAUGUUCCUGCUUCAUAUU | 2259 | UAUGAAGCAGGAACAUACCUU | 2260 |
| D-1566 | GUAUGUUCCUGCUUCAUGUUU | 2261 | ACAUGAAGCAGGAACAUACUU | 2262 |
| D-1567 | UAUGUUCCUGCUUCAUGCAUU | 2263 | UGCAUGAAGCAGGAACAUAUU | 2264 |
| D-1568 | AUGUUCCUGCUUCAUGCCUUU | 2265 | AGGCAUGAAGCAGGAACAUUU | 2266 |
| D-1569 | UGUUCCUGCUUCAUGCCUUUU | 2267 | AAGGCAUGAAGCAGGAACAUU | 2268 |
| D-1570 | GUUCCUGCUUCAUGCCUUUUU | 2269 | AAAGGCAUGAAGCAGGAACUU | 2270 |
| D-1571 | UUCCUGCUUCAUGCCUUUUUU | 2271 | AAAAGGCAUGAAGCAGGAAUU | 2272 |
| D-1572 | UUCCUGCUUCAUGCCUUUAUU | 2273 | UAAAGGCAUGAAGCAGGAAUU | 2274 |
| D-1573 | UCCUGCUUCAUGCCUUUCUUU | 2275 | AGAAAGGCAUGAAGCAGGAUU | 2276 |
| D-1574 | CCUGCUUCAUGCCUUUCUAUU | 2277 | UAGAAAGGCAUGAAGCAGGUU | 2278 |
| D-1575 | CUGCUUCAUGCCUUUCUAUUU | 2279 | AUAGAAAGGCAUGAAGCAGUU | 2280 |
| D-1576 | CUGCUUCAUGCCUUUCUAAUU | 2281 | UUAGAAAGGCAUGAAGCAGUU | 2282 |
| D-1577 | UGCUUCAUGCCUUUCUACAUU | 2283 | UGUAGAAAGGCAUGAAGCAUU | 2284 |
| D-1578 | GCUUCAUGCCUUUCUACAUUU | 2285 | AUGUAGAAAGGCAUGAAGCUU | 2286 |
| D-1579 | GCUUCAUGCCUUUCUACAAUU | 2287 | UUGUAGAAAGGCAUGAAGCUU | 2288 |
| D-1580 | CUUCAUGCCUUUCUACAGUUU | 2289 | ACUGUAGAAAGGCAUGAAGUU | 2290 |
| D-1581 | UUCAUGCCUUUCUACAGUUUU | 2291 | AACUGUAGAAAGGCAUGAAUU | 2292 |
| D-1582 | UUCAUGCCUUUCUACAGUAUU | 2293 | UACUGUAGAAAGGCAUGAAUU | 2294 |
| D-1583 | UCAUGCCUUUCUACAGUGUUU | 2295 | ACACUGUAGAAAGGCAUGAUU | 2296 |
| D-1584 | UCAUGCCUUUCUACAGUGAUU | 2297 | UCACUGUAGAAAGGCAUGAUU | 2298 |
| D-1585 | CAUGCCUUUCUACAGUGGUUU | 2299 | ACCACUGUAGAAAGGCAUGUU | 2300 |
| D-1586 | CAUGCCUUUCUACAGUGGAUU | 2301 | UCCACUGUAGAAAGGCAUGUU | 2302 |
| D-1587 | AUGCCUUUCUACAGUGGCUUU | 2303 | AGCCACUGUAGAAAGGCAUUU | 2304 |
| D-1588 | AUGCCUUUCUACAGUGGCAUU | 2305 | UGCCACUGUAGAAAGGCAUUU | 2306 |
| D-1589 | UGCCUUUCUACAGUGGCCUUU | 2307 | AGGCCACUGUAGAAAGGCAUU | 2308 |
| D-1590 | GCCUUUCUACAGUGGCCUUUU | 2309 | AAGGCCACUGUAGAAAGGCUU | 2310 |
| D-1591 | GGUAUGUUCCUGCUUCAUCUU | 2311 | GAUGAAGCAGGAACAUACCUU | 2312 |
| D-1592 | GUAUGUUCCUGCUUCAUCCUU | 2313 | GGAUGAAGCAGGAACAUACUU | 2314 |
| D-1593 | UAUGUUCCUGCUUCAUCCCUU | 2315 | GGGAUGAAGCAGGAACAUAUU | 2316 |
| D-1594 | AUGUUCCUGCUUCAUCCCCUU | 2317 | GGGGAUGAAGCAGGAACAUUU | 2318 |
| D-1595 | UGUUCCUGCUUCAUCCCCUUU | 2319 | AGGGGAUGAAGCAGGAACAUU | 2320 |
| D-1596 | GUUCCUGCUUCAUCCCCUUUU | 2321 | AAGGGGAUGAAGCAGGAACUU | 2322 |
| D-1597 | UUCCUGCUUCAUCCCCUUCUU | 2323 | GAAGGGGAUGAAGCAGGAAUU | 2324 |
| D-1598 | UCCUGCUUCAUCCCCUUCUUU | 2325 | AGAAGGGGAUGAAGCAGGAUU | 2326 |
| D-1599 | CCUGCUUCAUCCCCUUCUAUU | 2327 | UAGAAGGGGAUGAAGCAGGUU | 2328 |
| D-1600 | CUGCUUCAUCCCCUUCUACUU | 2329 | GUAGAAGGGGAUGAAGCAGUU | 2330 |
| D-1601 | UGCUUCAUCCCCUUCUACAUU | 2331 | UGUAGAAGGGGAUGAAGCAUU | 2332 |
| D-1602 | GCUUCAUCCCCUUCUACAGUU | 2333 | CUGUAGAAGGGGAUGAAGCUU | 2334 |
| D-1603 | CUUCAUCCCCUUCUACAGUUU | 2335 | ACUGUAGAAGGGGAUGAAGUU | 2336 |
| D-1604 | UUCAUCCCCUUCUACAGUGUU | 2337 | CACUGUAGAAGGGGAUGAAUU | 2338 |
| D-1605 | UCAUCCCCUUCUACAGUGGUU | 2339 | CCACUGUAGAAGGGGAUGAUU | 2340 |
| D-1606 | CAUCCCCUUCUACAGUGGCUU | 2341 | GCCACUGUAGAAGGGGAUGUU | 2342 |
| D-1607 | AUCCCCUUCUACAGUGGCCUU | 2343 | GGCCACUGUAGAAGGGGAUUU | 2344 |
| D-1608 | UCCCCUUCUACAGUGGCCUUU | 2345 | AGGCCACUGUAGAAGGGGAUU | 2346 |
| D-1609 | CCCCUUCUACAGUGGCCUUUU | 2347 | AAGGCCACUGUAGAAGGGGUU | 2348 |
| D-1610 | CUGCUUCAUGCCUUUCUACAA | 2441 | AUGUAGAAAGGCAUGAAGCAGUU | 2442 |
| D-1611 | CUGCUUCAUGCCUUUCUACAA | 2443 | AUGUAGAAAGGCAUGAAGCAGUU | 2444 |
| D-1612 | CUGCUUCAUGCCUUUCUACAA | 2445 | AUGUAGAAAGGCAUGAAGCAGUU | 2446 |
| D-1613 | CUGCUUCAUGCCUUUCUACAA | 2447 | AUGUAGAAAGGCAUGAAGCAGUU | 2448 |
| D-1614 | CUGCUUCAUGCCUUUCUACAA | 2449 | AUGUAGAAAGGCAUGAAGCAGUU | 2450 |
| D-1615 | CUGCUUCAUGCCUUUCUACAA | 2451 | AUGUAGAAAGGCAUGAAGCAGUU | 2452 |
| D-1616 | CUGCUUCAUGCCUUUCUACAA | 2453 | AUGUAGAAAGGCAUGAAGCAGUU | 2454 |
| D-1617 | CUGCUUCAUGCCUUUCUACAA | 2455 | AUGUAGAAAGGCAUGAAGCAGUU | 2456 |
| D-1618 | CUGCUUCAUGCCUUUCUACAA | 2457 | AUGUAGAAAGGCAUGAAGCAGUU | 2458 |
| D-1619 | CUGCUUCAUGCCUUUCUACAA | 2459 | AUGUAGAAAGGCAUGAAGCAGUU | 2460 |
| D-1620 | CUGCUUCAUGCCUUUCUACAA | 2461 | AUGUAGAAAGGCAUGAAGCAGUU | 2462 |
| D-1621 | CUGCUUCAUGCCUUUCUACAA | 2463 | AUGUAGAAAGGCAUGAAGCAGUU | 2464 |
| D-1622 | CUGCUUCAUGCCUUUCUACAA | 2465 | AUGUAGAAAGGCAUGAAGCAGUU | 2466 |
| D-1623 | CUGCUUCAUGCCUUUCUACAA | 2467 | AUGUAGAAAGGCAUGAAGCAGUU | 2468 |
| D-1624 | CUGCUUCAUGCCUUUCUACAA | 2469 | AUGUAGAAAGGCAUGAAGCAGUU | 2470 |
| D-1625 | CUGCUUCAUGCCUUUCUACAA | 2471 | AUGUAGAAAGGCAUGAAGCAGUU | 2472 |
| D-1626 | CUGCUUCAUGCCUUUCUACAA | 2473 | AUGUAGAAAGGCAUGAAGCAGUU | 2474 |
| D-1627 | CUGCUUCAUGCCUUUCUACAA | 2475 | AUGUAGAAAGGCAUGAAGCAGUU | 2476 |
| D-1628 | CUGCUUCAUGCCUUUCUACAA | 2477 | AUGUAGAAAGGCAUGAAGCAGUU | 2478 |
| D-1629 | CUGCUUCAUGCCUUUCUACAA | 2479 | AUGUAGAAAGGCAUGAAGCAGUU | 2480 |
| D-1630 | CUGCUUCAUGCCUUUCUACAA | 2481 | AUGUAGAAAGGCAUGAAGCAGUU | 2482 |
| D-1631 | CUGCUUCAUGCCUUUCUACAA | 2483 | AUGUAGAAAGGCAUGAAGCAGUU | 2484 |
| D-1632 | CUGCUUCAUGCCUUUCUACAA | 2485 | AUGUAGAAAGGCAUGAAGCAGUU | 2486 |
| D-1633 | CUGCUUCAUGCCUUUCUACAA | 2487 | AUGUAGAAAGGCAUGAAGCAGUU | 2488 |
| D-1634 | CUGCUUCAUGCCUUUCUACAA | 2489 | AUGUAGAAAGGCAUGAAGCAGUU | 2490 |
| D-1635 | CUGCUUCAUGCCUUUCUACAA | 2491 | AUGUAGAAAGGCAUGAAGCAGUU | 2492 |
| D-1636 | CUGCUUCAUGCCUUUCUACAA | 2493 | AUGUAGAAAGGCAUGAAGCAGUU | 2494 |
| D-1637 | UGCUUCAUGCCUUUCUACAGA | 2495 | UCUGUAGAAAGGCAUGAAGCAUU | 2496 |
| D-1638 | UGCUUCAUGCCUUUCUACAGA | 2497 | UCUGUAGAAAGGCAUGAAGCAUU | 2498 |
| D-1639 | UGCUUCAUGCCUUUCUACAGA | 2499 | UCUGUAGAAAGGCAUGAAGCAUU | 2500 |
| D-1640 | UGCUUCAUGCCUUUCUACAGA | 2501 | UCUGUAGAAAGGCAUGAAGCAUU | 2502 |
| D-1641 | UGCUUCAUGCCUUUCUACAGA | 2503 | UCUGUAGAAAGGCAUGAAGCAUU | 2504 |
| D-1642 | UGCUUCAUGCCUUUCUACAGA | 2505 | UAUGUAGAAAGGCAUGAAGCAUU | 2506 |
| D-1643 | UGCUUCAUGCCUUUCUACAGA | 2507 | UCAGUAGAAAGGCAUGAAGCAUU | 2508 |
| D-1644 | UGCUUCAUGCCUUUCUACAGA | 2509 | UCUAUAGAAAGGCAUGAAGCAUU | 2510 |
| D-1645 | UGCUUCAUGCCUUUCUACAGA | 2511 | UCUGAAGAAAGGCAUGAAGCAUU | 2512 |
| D-1646 | UGCUUCAUGCCUUUCUACAGA | 2513 | UCUGUAGAAAGGCAUGAAGCAUU | 2514 |
| D-1647 | UGCUUCAUGCCUUUCUACAGA | 2515 | UCUGUAAAAAGGCAUGAAGCAUU | 2516 |
| D-1648 | UGCUUCAUGCCUUUCUACAGA | 2517 | UCUGUAGAAAGGCAUGAAGCAUU | 2518 |
| D-1649 | UCAUGCCUUUCUACAGUGGCT | 2519 | AGCCACUGUAGAAAGGCAUGAUU | 2520 |
| D-1650 | UCAUGCCUUUCUACAGUGGCA | 2521 | UGCCACUGUAGAAAGGCAUGAUU | 2522 |
| D-1651 | UCAUGCCUUUCUACAGUGGCA | 2523 | UGCCACUGUAGAAAGGCAUGAUU | 2524 |
| D-1652 | UCCUGCUUCAUGCCUUUCUAT | 2525 | AUAGAAAGGCAUGAAGCAGGAUU | 2526 |
| D-1653 | UCCUGCUUCAUGCCUUUCUAA | 2527 | UUAGAAAGGCAUGAAGCAGGAUU | 2528 |
| D-1654 | UCCUGCUUCAUGCCUUUCUAA | 2529 | UUAGAAAGGCAUGAAGCAGGAUU | 2530 |
| D-1655 | UAUGUUCCUGCUUCAUGCCUT | 2531 | AAGGCAUGAAGCAGGAACAUAUU | 2532 |
| D-1656 | UAUGUUCCUGCUUCAUGCCUA | 2533 | UAGGCAUGAAGCAGGAACAUAUU | 2534 |
| D-1657 | UAUGUUCCUGCUUCAUGCCUA | 2535 | UAGGCAUGAAGCAGGAACAUAUU | 2536 |
| D-1658 | UCCUGCUUCAUGCCUUUCUAA | 2537 | AUAGAAAGGCAUGAAGCAGGAUU | 2538 |
| D-1659 | UAUGUUCCUGCUUCAUGCCUA | 2539 | AAGGCAUGAAGCAGGAACAUAUU | 2540 |
| D-1660 | UAUGUUCCUGCUUCAUGCCUA | 2541 | AAGGCAUGAAGCAGGAACAUAUU | 2542 |
| D-1661 | UCAUGCCUUUCUACAGUGGCT | 2543 | AGCCACUGUAGAAAGGCAUGAUU | 2544 |
| D-1662 | UCCUGCUUCAUGCCUUUCUAT | 2545 | AUAGAAAGGCAUGAAGCAGGAUU | 2546 |
| D-1663 | UCCUGCUUCAUGCCUUUCUAA | 2547 | UUAGAAAGGCAUGAAGCAGGAUU | 2548 |
| D-1664 | UAUGUUCCUGCUUCAUGCCUA | 2549 | UAGGCAUGAAGCAGGAACAUAUU | 2550 |
| D-1665 | UGCUUCAUGCCUUUCUACAGA | 2551 | UCUGUAGAAAGGCAUGAAGCAUU | 2552 |
| D-1666 | CUGCUUCAUGCCUUUCUACAA | 2553 | AUGUAGAAAGGCAUGAAGCAGUU | 2554 |
| D-1667 | CUGCUUCAUGCCUUUCUACAA | 2555 | AUGUAGAAAGGCAUGAAGCAGUU | 2556 |
| D-1668 | CUGCUUCAUGCCUUUCUACAA | 2557 | AUGUAGAAAGGCAUGAAGCAGUU | 2558 |
| D-1669 | CUGCUUCAUGCCUUUCUACAA | 2559 | AUGUAGAAAGGCAUGAAGCAGUU | 2560 |
| D-1670 | CUGCUUCAUGCCUUUCUACAA | 2561 | AUGUAGAAAGGCAUGAAGCAGUU | 2562 |
| D-1671 | CUGCUUCAUGCCUUUCUACAA | 2563 | AUGUAGAAAGGCAUGAAGCAGUU | 2564 |
| D-1672 | CUGCUUCAUGCCUUUCUACAA | 2565 | AUGUAGAAAGGCAUGAAGCAGUU | 2566 |
| D-1673 | CUGCUUCAUGCCUUUCUACAA | 2567 | AUGUAGAAAGGCAUGAAGCAGUU | 2568 |
| D-1674 | CUGCUUCAUGCCUUUCUACAA | 2569 | AUGUAGAAAGGCAUGAAGCAGUU | 2570 |
| D-1675 | CUGCUUCAUGCCUTUCUACAA | 2571 | AUGUAGAAAGGCAUGAAGCAGUU | 2572 |
| D-1676 | CUGCUUCAUGCCTUUCUACAA | 2573 | AUGUAGAAAGGCAUGAAGCAGUU | 2574 |
| D-1677 | CUGCUUCAUGCCUUTCUACAA | 2575 | AUGUAGAAAGGCAUGAAGCAGUU | 2576 |
| D-1678 | CUGCUUCAUGCCUUUCTACAA | 2577 | AUGUAGAAAGGCAUGAAGCAGUU | 2578 |
| D-1679 | CUGCUUCAUGCCUUUCUACAA | 2579 | AUGUAGAAAGGCAUGAAGCAGUU | 2580 |
| D-1680 | CUGCUUCAUGCCUUUCUACAA | 2581 | AUGUAGAAAGGCAUGAAGCAGUU | 2582 |
| D-1681 | CUGCUUCAUGCCUUTCUACAA | 2583 | AUGUAGAAAGGCAUGAAGCAGUU | 2584 |
| D-1682 | CUGCUUCAUGCCUUUCTACAA | 2585 | AUGUAGAAAGGCAUGAAGCAGUU | 2586 |
| D-1683 | CUGCUUCAUGCCUUUCUACAA | 2587 | AUGAAGAAAGGCAUGAAGCAGUU | 2588 |
| D-1684 | CUGCUUCAUGCCUUUCUACAA | 2589 | AUGUAGAAAGGCAUGAAGCAGUU | 2590 |
| D-1685 | CUGCUUCAUGCCUUUCUACAA | 2591 | AUGUAGAAAGGCAUGAAGCAGUU | 2592 |
| D-1686 | CUGCUUCAUGCCUTUCUACAA | 2593 | AUGUAGAAAGGCAUGAAGCAGUU | 2594 |
| D-1687 | CUGCUUCAUGCCUTUCUACAA | 2595 | AUGUAGAAAGGCAUGAAGCAGUU | 2596 |
| D-1688 | CUGCUUCAUGCCUTUCUACAA | 2597 | AUGUAGAAAGGCAUGAAGCAGUU | 2598 |
| D-1689 | CUGCUUCAUGCCUTUCUACAA | 2599 | AUGUAGAAAGGCAUGAAGCAGUU | 2600 |
| D-1690 | UGCUUCAUGCCUUUCUACAGA | 2601 | UCUGAAGAAAGGCAUGAAGCAUU | 2602 |
| D-1691 | UGCUUCAUGCCUUUCTACAGA | 2603 | UCUGUAGAAAGGCAUGAAGCAUU | 2604 |
| D-1692 | UGCUUCAUGCCUUTCUACAGA | 2605 | UCUGUAGAAAGGCAUGAAGCAUU | 2606 |
| D-1693 | UGCUUCAUGCCUUUCUACAGA | 2607 | UCUGUAGAAAGGCAUGAAGCAUU | 2608 |
| D-1694 | UGCUUCAUGCCUUUCUACAGA | 2609 | UCUGUAGAAAGGCAUGAAGCAUU | 2610 |
| D-1695 | UGCUUCAUGCCUUUCTACAGA | 2611 | UCUGUAGAAAGGCAUGAAGCAUU | 2612 |
| D-1696 | UGCUUCAUGCCUUUCUACAGA | 2613 | UAUGUAGAAAGGCAUGAAGCAUU | 2614 |
| D-1697 | UGCUUCAUGCCUUUCUACAGA | 2615 | UCAGUAGAAAGGCAUGAAGCAUU | 2616 |
| D-1698 | UCAUGCCUUUCUACAGUGGCA | 2617 | AGCCAAUGUAGAAAGGCAUGAUU | 2618 |
| D-1699 | UCAUGCCUUUCUACAGTGGCA | 2619 | AGCCAAUGUAGAAAGGCAUGAUU | 2620 |
| D-1700 | UCAUGCCUUUCUACAGUGGCA | 2621 | AGCCAAUGUAGAAAGGCAUGAUU | 2622 |
| D-1701 | CUGCUUCAUGCCUUUCUACAA | 2623 | AUGUAGAAAGGCAUGAAGCAGUU | 2624 |
| D-1702 | CUGCUUCAUGCCUUUCUACAA | 2625 | AUAUAGAAAGGCAUGAAGCAGUU | 2626 |
| D-1703 | UGCUUCAUGCCUUUCUACAGA | 2627 | UCUAUAGAAAGGCAUGAAGCAUU | 2628 |
| D-1704 | UGCUUCAUGCCUUUCUACAGA | 2629 | UCUGUAGAAAGGCAUGAAGCAUU | 2630 |
| D-1705 | UCAUGCCUUUCUACAGUGGCA | 2631 | AGCCAAUGUAGAAAGGCAUGAUU | 2632 |
| D-1706 | UCAUGCCUUUCUACAGUGGCA | 2633 | AGCCAAUGUAGAAAGGCAUGAUU | 2634 |
| D-1707 | UCAUGCCUUUCUACAGUGGCA | 2635 | AGCCAAUGUAGAAAGGCAUGAUU | 2636 |
| D-1708 | UCAUGCCUUUCUACAGUGGCA | 2637 | AGCCAAUGUAGAAAGGCAUGAUU | 2638 |
| D-1709 | CUGCUUCAUGCCUUUCUACAA | 2639 | A[MEO-I]GUAGAAAGGCAUGAAGCAGUU | 2640 |
| D-1710 | CUGCUUCAUGCCUUUCUACAA | 2641 | AUG[MEO-I]AGAAAGGCAUGAAGCAGUU | 2642 |
| D-1711 | CUGCUUCAUGCCUUUCUACAA | 2643 | AUGU[MEO-I]GAAAGGCAUGAAGCAGUU | 2644 |
| D-1712 | CUGCUUCAUGCCUUUCUACAA | 2645 | AUGUA[MEO-I]AAAGGCAUGAAGCAGUU | 2646 |
| D-1713 | CUGCUUCAUGCCUUUCUACAA | 2647 | AUGUAGA[MEO-I]AGGCAUGAAGCAGUU | 2648 |
| D-1714 | CUGCUUCAUGCCUUUCUACCA | 2649 | A[MEO-I]GUAGAAAGGCAUGAAGCAGUU | 2650 |
| D-1715 | CUGCUUCAUGCCUUUCUCCAA | 2651 | AUG[MEO-I]AGAAAGGCAUGAAGCAGUU | 2652 |
| D-1716 | CUGCUUCAUGCCUUCCUACAA | 2653 | AUGUAG[MEO-I]AAGGCAUGAAGCAGUU | 2654 |
| D-1717 | CUGCUUCAUGCCUCUCUACAA | 2655 | AUGUAGA[MEO-I]AGGCAUGAAGCAGUU | 2656 |
| D-1718 | CUGCUUCAUGCCUUUCUACUA | 2657 | AAGUAGAAAGGCAUGAAGCAGUU | 2658 |
| D-1719 | CUGCUUCAUGCCUUUCUUCAA | 2659 | AUGAAGAAAGGCAUGAAGCAGUU | 2660 |
| D-1720 | CUGCUUCAUGCCUUUCAACAA | 2661 | AUGUUGAAAGGCAUGAAGCAGUU | 2662 |
| D-1721 | CUGCUUCAUGCCUAUCUACAA | 2663 | AUGUAGAUAGGCAUGAAGCAGUU | 2664 |
| D-1722 | UGCUUCAUGCCUUUCUACACA | 2665 | A[MEO-I]UGUAGAAAGGCAUGAAGCAUU | 2666 |
| D-1723 | UGCUUCAUGCCUUUCUACAGA | 2667 | AC[MEO-I]GUAGAAAGGCAUGAAGCAUU | 2668 |
| D-1724 | UGCUUCAUGCCUUUCUACAGA | 2669 | ACUG[MEO-I]AGAAAGGCAUGAAGCAUU | 2670 |
| D-1725 | UGCUUCAUGCCUUUCUACAGA | 2671 | ACUGU[MEO-I]GAAAGGCAUGAAGCAUU | 2672 |
| D-1726 | UGCUUCAUGCCUUUCUACAGA | 2673 | ACUGUA[MEO-I]AAAGGCAUGAAGCAUU | 2674 |
| D-1727 | UGCUUCAUGCCUUUCUACCGA | 2675 | AC[MEO-I]GUAGAAAGGCAUGAAGCAUU | 2676 |
| D-1728 | UGCUUCAUGCCUUUCUCCAGA | 2677 | ACUG[MEO-I]AGAAAGGCAUGAAGCAUU | 2678 |
| D-1729 | UGCUUCAUGCCUUUCCACAGA | 2679 | ACUGU[MEO-I]GAAAGGCAUGAAGCAUU | 2680 |
| D-1730 | CUGCUUCAUGCCUUUCUAAAA | 2681 | AUUUAGAAAGGCAUGAAGCAGUU | 2682 |
| D-1731 | CUGCUUCAUGCCUUUAUACAA | 2683 | AUGUAUAAAGGCAUGAAGCAGUU | 2684 |
| D-1732 | CUGCUUCAUGCCUUUCUACAA | 2685 | AUGUAGAAAGGCAUGAAGCAGUU | 2686 |
| D-1733 | CUGCUUCAUGCCUTUCUACAA | 2687 | AUGUAGAAAGGCAUGAAGCAGUU | 2688 |
| D-1734 | UGCUUCAUGCCUUUCUACAGA | 2689 | UCUGUAGAAAGGCAUGAAGCAUU | 2690 |
| D-1735 | UGCUUCAUGCCUUTCUACAGA | 2691 | UCUGUAGAAAGGCAUGAAGCAUU | 2692 |
| D-1736 | UCAUGCCUUUCUACAGUGGCA | 2693 | AGCCAAUGUAGAAAGGCAUGAUU | 2694 |
| D-1737 | CUGCUUCAUGCCUUUCUACAA | 2695 | AUGUAAAAAGGCAUGAAGCAGUU | 2696 |
| D-1738 | UCAUGCCUUUCUACAGUGGCA | 2697 | AGCCAAUGUAGAAAGGCAUGAUU | 2698 |
| D-1739 | CUGCUUCAUGCCUUUCUACAA | 2699 | AU[MEO-I]UAGAAAGGCAUGAAGCAGUU | 2700 |
| D-1740 | CUGCUUCAUGCCUUUCUAGAA | 2701 | AUCUAGAAAGGCAUGAAGCAGUU | 2702 |
| D-1741 | CUGCUUCAUGCCUUACUACAA | 2703 | AUGUAGUAAGGCAUGAAGCAGUU | 2704 |
| D-1742 | UGCUUCAUGCCUUUCUACAGA | 2705 | ACU[MEO-I]UAGAAAGGCAUGAAGCAUU | 2706 |
| D-1743 | UGCUUCAUGCCUUUCUACAGA | 2707 | ACUGUAG[MEO-I]AAGGCAUGAAGCAUU | 2708 |
| D-1744 | UGCUUCAUGCCUUCCUACAGA | 2709 | ACUGUAG[MEO-I]AAGGCAUGAAGCAUU | 2710 |
| D-1745 | CUGCUUCAUGCCUUUCUAUAA | 2711 | AUAUAGAAAGGCAUGAAGCAGUU | 2712 |
| D-1746 | CUGCUUCAUGCCUUUUUACAA | 2713 | AUGUAAAAAGGCAUGAAGCAGUU | 2714 |
| D-1747 | CUGCUUCAUGCCUUUCUACAA | 2715 | AUGUAGAAAGGCAUGAAGCAGUU | 2716 |
| D-1748 | CUGCUUCAUGCCUUUCUACAA | 2717 | AUGUAGAAAGGCAUGAAGCAGUU | 2718 |
| D-1749 | CUGCUUCAUGCCUUTCUACAA | 2719 | AUGUAGAAAGGCAUGAAGCAGUU | 2720 |
| D-1750 | CUGCUUCAUGCCUTUCUACAA | 2721 | AUGUAGAAAGGCAUGAAGCAGUU | 2722 |
| D-1751 | CUGCUUCAUGCCUUUCUACAA | 2723 | AAGUAGAAAGGCAUGAAGCAGUU | 2724 |
| D-1752 | CUGCUUCAUGCCUUUCUACAA | 2725 | AUGUAGAAAGGCAUGAAGCAGUU | 2726 |
| D-1753 | UGCUUCAUGCCUUUCUACAGA | 2727 | UCUGUAAAAAGGCAUGAAGCAUU | 2728 |
| D-1754 | CUGCUUCAUGCCUUUCUACAA | 2729 | AUGUAG[MEO-I]AAGGCAUGAAGCAGUU | 2730 |
| D-1755 | CUGCUUCAUGCCUUUCUACAA | 2731 | AUGUAGAAAGGCAUGAAGCAGUU | 2732 |
| D-1756 | CUGCUUCAUGCCUTUCUACAA | 2733 | AUGUAGAAAGGCAUGAAGCAGUU | 2734 |
| D-1757 | CUGCUUCAUGCCUUUCUACAA | 2735 | AUGUAGAAAGGCAUGAAGCAGUU | 2736 |
| D-1758 | CUGCUUCAUGCCUUUCUACAA | 2737 | AUGUAGAAAGGCAUGAAGCAGUU | 2738 |
| D-1759 | CUGCUUCAUGCCUUUCUACAA | 2739 | AUGUAGAAAGGCAUGAAGCAGUU | 2740 |
| D-1760 | CUGCUUCAUGCCUUUCUACAA | 2741 | AUGUAGAAAGGCAUGAAGCAGUU | 2742 |
| D-1761 | CUGCUUCAUGCCUUUCUACAA | 2743 | AUGUAGAAAGGCAUGAAGCAGUU | 2744 |
| D-1762 | CUGCUUCAUGCCUUUCUACAA | 2745 | AUGUAGAAAGGCAUGAAGCAGUU | 2746 |
| D-1763 | CUGCUUCAUGCCUTUCUACAA | 2747 | AUGUAGAAAGGCAUGAAGCAGUU | 2748 |
| D-1764 | CUGCUUCAUGCCUUUCUACAA | 2749 | AUGUAGAAAGGCAUGAAGCAGUU | 2750 |
| D-1765 | UCAUGCCUUUCUACAGUGGCA | 2751 | AGCCAAUGUAGAAAGGCAUGAUU | 2752 |
| D-1766 | UCAUGCCUUUCUACAGUGGCA | 2753 | AGCCAAUGUAGAAAGGCAUGAUU | 2754 |
| D-1767 | CUGCUUCAUGGGAUUCUACAA | 2755 | AUGUAGAAUCCCAUGAAGCAGUU | 2756 |
| D-1768 | CUGCUUCAUGCCUUUCUACAA | 2757 | AUGUAGAAAGGCAUGAAGCAGUU | 2758 |
| D-1769 | GUAUGUUCCUGCUUCAUGCCA | 2759 | AGGCAUGAAGCAGGAACAUACUU | 2760 |
| D-1770 | UGUCCUGCUUCAUGCCUUUCA | 2761 | AGAAAGGCAUGAAGCAGGACAUU | 2762 |
| D-1771 | GCUUCAUGCCUUUCUACAGUA | 2763 | AACUGUAGAAAGGCAUGAAGCUU | 2764 |
| D-1772 | CUUCAUGCCUUUCUACAGUGA | 2765 | ACACUGUAGAAAGGCAUGAAGUU | 2766 |
| D-1773 | UUCAUGCCUUUCUACAGUGGA | 2767 | ACCACUGUAGAAAGGCAUGAAUU | 2768 |
| D-1774 | CUGCUUCAUGCCUUUCAACAA | 2769 | AUGUUGAAAGGCAUGAAGCAGUU | 2770 |
| D-1775 | CUGCUUCAUGCCUUUCUCCAA | 2771 | AUG[MEO-I]AGAAAGGCAUGAAGCAGUU | 2772 |
| D-1776 | UGCUUCAUGCCUUUCUCCAGA | 2773 | ACUG[MEO-I]AGAAAGGCAUGAAGCAUU | 2774 |
| D-1777 | CUGCUUCAUGCCUUUCUACAA | 2775 | AUGU[MEO-I]GAAAGGCAUGAAGCAGUU | 2776 |
| D-1778 | UGCUUCAUGCCUUUCUACAGA | 2777 | ACUGU[MEO-I]GAAAGGCAUGAAGCAUU | 2778 |
| D-1779 | CUGCUUCAUGCCUUUCUACAA | 2779 | AUGUA[MEO-I]AAAGGCAUGAAGCAGUU | 2780 |
| D-1780 | UGCUUCAUGCCUUUCUACAGA | 2781 | ACUGUA[MEO-I]AAAGGCAUGAAGCAUU | 2782 |
| D-1781 | CUGCUUCAUGCCUUCCUACAA | 2783 | AUGUAG[MEO-I]AAGGCAUGAAGCAGUU | 2784 |
| D-1782 | CUGCUUCAUGCCUCUCUACAA | 2785 | AUGUAGA[MEO-I]AGGCAUGAAGCAGUU | 2786 |
| D-1783 | UGCUUCAUGCCUUUCUACAGA | 2787 | UCUGAAGAAAGGCAUGAAGCAUU | 2788 |
| D-1784 | UGCUUCAUGCCUUUCUACAGA | 2789 | UCUGUAGAAAGGCAUGAAGCAUU | 2790 |
| D-1785 | UCAUGCCUUUCUACAGUGGCA | 2791 | AGCCAAUGUAGAAAGGCAUGAUU | 2792 |
| D-1786 | CUGCUUCAUGCCUUUCTACAA | 2793 | AUGUAGAAAGGCAUGAAGCAGUU | 2794 |
| D-1787 | CUGCUUCAUGCCUUUCTACAA | 2795 | AUGUAGAAAGGCAUGAAGCAGUU | 2796 |
| D-1788 | UGCUUCAUGCCUUUCTACAGA | 2797 | UCUGUAGAAAGGCAUGAAGCAUU | 2798 |
| D-1789 | UGCUUCAUGCCUUUCUACAGA | 2799 | UCUGUAGAAAGGCAUGAAGCAUU | 2800 |
| D-1790 | UCAUGCCUUUCUACAGUGGCA | 2801 | AGCCAAUGUAGAAAGGCAUGAUU | 2802 |
| D-1791 | CUGCUUCAUGCCUUUCUACAA | 2803 | AU[MEO-I]UAGAAAGGCAUGAAGCAGUU | 2804 |
| D-1792 | CUGCUUCAUGCCUUUCUACAA | 2805 | AUGUAG[MEO-I]AAGGCAUGAAGCAGUU | 2806 |
| D-1793 | CUGCUUCAUGCCUUACUACAA | 2807 | AUGUAGUAAGGCAUGAAGCAGUU | 2808 |
| D-1794 | UGCUUCAUGCCUUUCUACAGA | 2809 | ACUGUAG[MEO-I]AAGGCAUGAAGCAUU | 2810 |
| D-1795 | UGCUUCAUGCCUUCCUACAGA | 2811 | ACUGUAG[MEO-I]AAGGCAUGAAGCAUU | 2812 |
| D-1796 | UGCUUCAUGCCUUUCUACAGA | 2813 | ACU[MEO-I]UAGAAAGGCAUGAAGCAUU | 2814 |
| D-1797 | CUGCUUCAUGCCUUUCUACAA | 2815 | AUGU[MEO-I]GAAAGGCAUGAAGCAGUU | 2816 |
| D-1798 | CUGCUUCAUGCCUUUCUACAA | 2817 | AUGU[MEO-I]GAAAGGCAUGAAGCAGUU | 2818 |
| D-1799 | CUGCUUCAUGCCUUUCUACAA | 2819 | AUGU[MEO-I]GAAAGGCAUGAAGCAGUU | 2820 |
| D-1800 | CUGCUUCAUGCCUUUCUACAA | 2821 | AUGUAG[MEO-I]AAGGCAUGAAGCAGUU | 2822 |
| D-1801 | UCAUGCCUUUCUACAGUGGCA | 2823 | AGCCAAUGUAGAAAGGCAUGAUU | 2824 |
| D-1802 | UCAUGCCUUUCUACAGUGGCA | 2825 | AGCCAAUGUAGAAAGGCAUGAUU | 2826 |
| D-1803 | CUGCUUCAUGGGAUUGUACAA | 2827 | AUGUACAAUCCCAUGAAGCAGUU | 2828 |
| D-1804 | CUGCUUCAUGCCUUUCTACAA | 2829 | AUGU[MEO-I]GAAAGGCAUGAAGCAGUU | 2830 |
| D-1805 | UGCUUCAUGCCUUUCUACAGA | 2831 | ACUGUA[MEO-I]AAAGGCAUGAAGCAUU | 2832 |
| D-1806 | CUGCUUCAUGCCUTUCUACAA | 2833 | AUGUAGAAAGGCAUGAAGCAGUU | 2834 |
| D-1807 | CUGCUUCAUGCCUTUCUACAA | 2835 | AUGUAGAAAGGCAUGAAGCAGUU | 2836 |
| D-1808 | CUGCUUCAUGCCUUTCUACAA | 2837 | AUGUAG[MEO-I]AAGGCAUGAAGCAGUU | 2838 |
| D-1809 | UCAUGCCUUUCUACAGUGGCA | 2839 | AGCCACUGUAGAAAGGCAUGAUU | 2840 |
| D-1810 | UAUGUUCCUGCUUCAUGCCUA | 2841 | AAGGCAUGAAGCAGGAACAUAUU | 2842 |
| D-1811 | UGCUUCAUGCCUUUCUACAGA | 2843 | ACUGUAGAAAGGCAUGAAGCAUU | 2844 |
| D-1812 | UGUUCCUGCUUCAUGCCUUUA | 2845 | AAGGCAUGAAGCAGGAACAUU | 2846 |
| D-1813 | CUGCUUCAUGCCUUUCUACAA | 2847 | AUGUAGAAAGGCAUGAAGCAGUU | 2848 |
| D-1814 | UAUGUUCCUGCUUCAUGCCUA | 2849 | AAGGCAUGAAGCAGGAACAUAUU | 2850 |
| D-1815 | UGUUCCUGCUUCAUGCCUA | 2851 | AAGGCAUGAAGCAGGAACAUU | 2852 |
| D-1816 | UAUGUUCCUGCUUCAUGCCUUA | 2853 | AAGGCAUGAAGCAGGAACAUAUU | 2854 |
| D-1817 | UAUGUUCCUGCUUCAUGCCUA | 2855 | AAGGCAUGAAGCAGGAACAUACC | 2856 |
| D-1818 | UAUGUUCCUGCUUCAUGCCUUA | 2857 | AAGGCAUGAAGCAGGAACAUACC | 2858 |
| D-1819 | UAUGUUCCUGCUUCAUGCCUA | 2859 | AAGGCAUGAAGCAGGAACAUAUU | 2860 |
| D-1820 | UAUGUUCCUGCUUCAUGCGUA | 2861 | AACGCAUGAAGCAGGAACAUAUU | 2862 |
| D-1821 | UAUGUUCCUGCUUCAUGGCUA | 2863 | AAGCCAUGAAGCAGGAACAUAUU | 2864 |
| D-1822 | UAUGUUCCUGCUUCAAGCCUA | 2865 | AAGGCUUGAAGCAGGAACAUAUU | 2866 |
| D-1823 | UAUGUUCCUGCUUCUUGCCUA | 2867 | AAGGCAAGAAGCAGGAACAUAUU | 2868 |
| D-1824 | UAUGUUCCUGCUUGAUGCCUA | 2869 | AAGGCAUCAAGCAGGAACAUAUU | 2870 |
| D-1825 | UAUGUUCCUGCUACAUGCCUA | 2871 | AAGGCAUGUAGCAGGAACAUAUU | 2872 |
| D-1826 | UAUGUUCCUGCAUCAUGCCUA | 2873 | AAGGCAUGAUGCAGGAACAUAUU | 2874 |
| D-1827 | UAUGUUCCUGGUUCAUGCCUA | 2875 | AAGGCAUGAACCAGGAACAUAUU | 2876 |
| D-1828 | UAUGUUCCUCCUUCAUGCCUA | 2877 | AAGGCAUGAAGGAGGAACAUAUU | 2878 |
| D-1829 | UAUGUUCCAGCUUCAUGCCUA | 2879 | AAGGCAUGAAGCUGGAACAUAUU | 2880 |
| D-1830 | UAUGUUCGUGCUUCAUGCCUA | 2881 | AAGGCAUGAAGCACGAACAUAUU | 2882 |
| D-1831 | UAUGUUGCUGCUUCAUGCCUA | 2883 | AAGGCAUGAAGCAGCAACAUAUU | 2884 |
| D-1832 | UAUGUACCUGCUUCAUGCCUA | 2885 | AAGGCAUGAAGCAGGUACAUAUU | 2886 |
| D-1833 | UAUGAUCCUGCUUCAUGCCUA | 2887 | AAGGCAUGAAGCAGGAUCAUAUU | 2888 |
| D-1834 | UAUCUUCCUGCUUCAUGCCUA | 2889 | AAGGCAUGAAGCAGGAAGAUAUU | 2890 |
| D-1835 | UAAGUUCCUGCUUCAUGCCUA | 2891 | AAGGCAUGAAGCAGGAACUUAUU | 2892 |
| D-1836 | UUUGUUCCUGCUUCAUGCCUA | 2893 | AAGGCAUGAAGCAGGAACAAAUU | 2894 |
| D-1837 | AAUGUUCCUGCUUCAUGCCUA | 2895 | AAGGCAUGAAGCAGGAACAUUUU | 2896 |
| D-1838 | UCAUGCCUUUCUACAGUGGCA | 2897 | AGCCACUGUAGAAAGGCAUGAUU | 2898 |
| D-1839 | UCAUGCCUUUCUACAGUGGGA | 2899 | ACCCACUGUAGAAAGGCAUGAUU | 2900 |
| D-1840 | UCAUGCCUUUCUACAGUGCCA | 2901 | AGGCACUGUAGAAAGGCAUGAUU | 2902 |
| D-1841 | UCAUGCCUUUCUACAGUCGCA | 2903 | AGCGACUGUAGAAAGGCAUGAUU | 2904 |
| D-1842 | UCAUGCCUUUCUACAGAGGCA | 2905 | AGCCUCUGUAGAAAGGCAUGAUU | 2906 |
| D-1843 | UCAUGCCUUUCUACACUGGCA | 2907 | AGCCAGUGUAGAAAGGCAUGAUU | 2908 |
| D-1844 | UCAUGCCUUUCUACUGUGGCA | 2909 | AGCCACAGUAGAAAGGCAUGAUU | 2910 |
| D-1845 | UCAUGCCUUUCUAGAGUGGCA | 2911 | AGCCACUCUAGAAAGGCAUGAUU | 2912 |
| D-1846 | UCAUGCCUUUCUUCAGUGGCA | 2913 | AGCCACUGAAGAAAGGCAUGAUU | 2914 |
| D-1847 | UCAUGCCUUUCAACAGUGGCA | 2915 | AGCCACUGUUGAAAGGCAUGAUU | 2916 |
| D-1848 | UCAUGCCUUUGUACAGUGGCA | 2917 | AGCCACUGUACAAAGGCAUGAUU | 2918 |
| D-1849 | UCAUGCCUAUCUACAGUGGCA | 2919 | AGCCACUGUAGAUAGGCAUGAUU | 2920 |
| D-1850 | UCAUGCGUUUCUACAGUGGCA | 2921 | AGCCACUGUAGAAACGCAUGAUU | 2922 |
| D-1851 | UCAUGGCUUUCUACAGUGGCA | 2923 | AGCCACUGUAGAAAGCCAUGAUU | 2924 |
| D-1852 | UCAAGCCUUUCUACAGUGGCA | 2925 | AGCCACUGUAGAAAGGCUUGAUU | 2926 |
| D-1853 | UCUUGCCUUUCUACAGUGGCA | 2927 | AGCCACUGUAGAAAGGCAAGAUU | 2928 |
| D-1854 | UGAUGCCUUUCUACAGUGGCA | 2929 | AGCCACUGUAGAAAGGCAUCAUU | 2930 |
| D-1855 | ACAUGCCUUUCUACAGUGGCA | 2931 | AGCCACUGUAGAAAGGCAUGUUU | 2932 |
| D-1856 | UCAUGCCUUACUACAGUGGCA | 2933 | AGCCACUGUAGUAAGGCAUGAUU | 2934 |
| D-1857 | AUGCCUUUCUACAGUGGCUUA | 2935 | AGCCACUGUAGAAAGGCAUUU | 2936 |
| D-1858 | AUGCCUUUCUACAGUGGCA | 2937 | AGCCACUGUAGAAAGGCAUUU | 2938 |
| D-1859 | UCAUGCCUUUCUACAGUGGCA | 2939 | AGCCACUGUAGAAAGGCAUGAUU | 2940 |
| D-1860 | AAUGCCUUUCUACAGUGGCU | 2941 | AGCCACUGUAGAAAGGCAUUU | 2942 |
| D-1861 | UCAUGCCUUUCUACAGUGGCUA | 2943 | AGCCACUGUAGAAAGGCAUGAUU | 2944 |
| D-1862 | UCAUGCCUUUCUACAGUGGCA | 2945 | AGCCACUGUAGAAAGGCAUGAAG | 2946 |
| D-1863 | UCAUGCCUUUCUACAGUGGCUA | 2947 | AGCCACUGUAGAAAGGCAUGAAG | 2948 |
| D-1864 | UCAUGCCUUUCUACAGUGGCUA | 2949 | AGCCACUGUAGAAAGGCAUGAUU | 2950 |
| D-1865 | UCAUGCCUUUCUACAGUGGCA | 2951 | AGCCACUGUAGAAAGGCAUGAAG | 2952 |
| D-1866 | UCAUGCCUUUCUACAGUGGCUA | 2953 | AGCCACUGUAGAAAGGCAUGAAG | 2954 |
| D-1867 | CUGCUUCAUGCCUUUCUACAA | 2955 | AUGUA[MEO-I]AAAGGCAUGAAGCAGUU | 2956 |
| D-1868 | GCGGCUUCGACGGCUUCUAUU | 2957 | UAGAAGCCGUCGAAGCCGCUU | 2958 |
| D-1869 | GCGGCUUCGACGGGUUCUAUU | 2959 | UAGAACCCGUCGAAGCCGCUU | 2960 |
| D-1870 | GCGGCUUCGACGCCUUCUAUU | 2961 | UAGAAGGCGUCGAAGCCGCUU | 2962 |
| D-1871 | GCGGCUUCGACCGCUUCUAUU | 2963 | UAGAAGCGGUCGAAGCCGCUU | 2964 |
| D-1872 | GCGGCUUCCUGGGCUUCUAUU | 2965 | AUAGAAGCCCAGGAAGCCGCUU | 2966 |
| D-1873 | AGCUUCAUGGGAUUGUACAUUU | 2967 | AUGUACAAUCCCAUGAAGCUU | 2968 |
| D-1874 | UCAUGCCUUUGAUCACUGGCA | 2969 | AGCCAGUGAUCAAAGGCAUGAUU | 2970 |
| D-1875 | GCGGCUUCCUGGGCUUCUAUU | 2971 | UAGAAGCCCAGGAAGCCGCUU | 2972 |
| D-1876 | UGCUUCAUGCCUUUCUACAGA | 2973 | ACUGUAGAAAGGCAUGAAGCAUU | 2974 |
| D-1877 | UCAUGCCUUUCUACAGUGGCA | 2975 | AGCCACUGUAGAAAGGCAUGAUU | 2976 |
| D-1878 | CUGCUUCAUGCCUUUCUACAA | 2977 | AUGUAGAAAGGCAUGAAGCAGUU | 2978 |
| D-1879 | CUGCUUCAUGCCUUUCUACAA | 2979 | AUGUAGAAAGGCAUGAAGCAGUU | 2980 |
| D-1880 | CUGCUUCAUGCCUUUCUACAA | 2981 | AUGUAGAAAGGCAUGAAGCAGUU | 2982 |
| D-1881 | UCAUGCCUUUCUACAGUGGCA | 2983 | UGCCACUGUAGAAAGGCAUGAUU | 2984 |
| D-1882 | CUGCUUCAUGCCUUUCUACAA | 2985 | AUGUAGAAAGGCAUGAAGCAGUU | 2986 |
| D-1883 | UGCUUCAUGCCUUUCUACAGA | 2987 | UCUGUAGAAAGGCAUGAAGCAUU | 2988 |
| D-1884 | CUGCUUCAUGCCUUUCUACAT | 2989 | AUGUAGAAAGGCAUGAAGCAGUU | 2990 |

[0184] To improve the potency and in vivo stability of PNPLA3 siRNA sequences, chemical modifications were incorporated into PNPLA3 siRNA molecules. Specifically, 2′-O-methyl and 2′-fluoro modifications of the ribose sugar were incorporated at specific positions within the PNPLA3 siRNAs. Phosphorothioate internucleotide linkages were also incorporated at the terminal ends of the antisense and/or sense sequences. Table 2 below depicts the modifications in the sense and antisense sequences for each of the modified PNPLA3 siRNAs. The nucleotide sequences in Table 2 and other parts of the application are listed according to the following notations: A, U, G, and C=corresponding ribonucleotide; dT=deoxythymidine; dA=deoxyadenosine; dC=deoxycytidine; dG=deoxyguanosine; invDT=inverted deoxythymidine; invDA=inverted deoxyadenosine; invDC=inverted deoxycytidine; invDG=inverted deoxyguanosin; a, u, g, and c=corresponding 2′-O-methyl ribonucleotide; Af, Uf, Gf, and Cf=corresponding 2′-deoxy-2′-fluoro (“2′-fluoro”) ribonucleotide; Ab=A basic; MeO-I=2′ methoxy inosine; GNA=glycol nucleic acid; sGNA=glycol nucleic acid with 3′ phosphorothioate; LNA=locked nucleic acid. Insertion of an “s” in the sequence indicates that the two adjacent nucleotides are connected by a phosphorothiodiester group (e.g. a phosphorothioate internucleotide linkage). Unless indicated otherwise, all other nucleotides are connected by 3′-5′ phosphodiester groups. Each of the siRNA compounds in Table 2 comprises a 19 base pair duplex region with either a 2 nucleotide overhang at the 3′ end of both strands or bluntmer at one or both ends. The GalNAc3K 2A hxC6 is:

[chemical structure]

TABLE 2
siRNA sequences directed to PNPLA3 with modifications

| | | SEQ ID | | SEQ ID |
|---|---|---|---|---|
| Duplex | | NO: | | NO: |
| No. | Sense sequence (5′-3′) | (sense) | Antisense sequence (5′-3′) | (antisense) |
| D-2000 | GfsgsGfcAfaUfaAfAfGfuAfcCfuGfcUfsusUf | 167 | asGfscAfgGfuAfcuuUfaUfuGfcCfcsUfsu | 168 |
| D-2001 | CfsgsGfcCfaAfuGfUfCfcAfcCfaGfcUfsusUf | 169 | asGfscUfgGfuGfgacAfuUfgGfcCfgsUfsu | 170 |
| D-2002 | GfsgsUfcCfaGfcCfUfGfaAfcUfuCfuUfsusUf | 171 | asAfsgAfaGfuUfcagGfcUfgGfaCfcsUfsu | 172 |
| D-2003 | GfscsUfuCfaUfcCfCfCfuUfcUfaCfaGfsusUf | 173 | csUfsgUfaGfaAfgggGfaUfgAfaGfcsUfsu | 174 |
| D-2004 | GfscsGfgCfuUfcCfUfGfgGfcUfuCfuAfsusUf | 175 | usAfsgAfaGfcCfcagGfaAfgCfcGfcsUfsu | 176 |
| D-2005 | GfscsCfuCfuGfaGfCfUfgAfgUfuGfgUfsusUf | 177 | asCfscAfaCfuCfagcUfcAfgAfgGfcsUfsu | 178 |
| D-2006 | GfsusGfaCfaAfcGfUfAfcCfcUfuCfaUfsusUf | 179 | asUfsgAfaGfgGfuacGfuUfgUfcAfcsUfsu | 180 |
| D-2007 | CfscsCfgCfcUfcCfAfGfgUfcCfcAfaAfsusUf | 181 | usUfsuGfgGfaCfcugGfaGfgCfgGfgsUfsu | 182 |
| D-2008 | CfsusUfcAfuCfcCfCfUfuCfuAfcAfgUfsusUf | 183 | asCfsuGfuAfgAfaggGfgAfuGfaAfgsUfsu | 184 |
| D-2009 | GfsgsUfaUfgUfuCfCfUfgCfuUfcAfuGfsusUf | 185 | csAfsuGfaAfgCfaggAfaCfaUfaCfcsUfsu | 186 |
| D-2010 | GfsusAfuGfuUfcCfUfGfcUfuCfaUfgCfsusUf | 187 | gsCfsaUfgAfaGfcagGfaAfcAfuAfcsUfsu | 188 |
| D-2011 | UfsasUfgUfuCfcUfGfCfuUfcAfuGfcCfsusUf | 189 | gsGfscAfuGfaAfgcaGfgAfaCfaUfasUfsu | 190 |
| D-2012 | AfsusGfuUfcCfuGfCfUfuCfaUfgCfcCfsusUf | 191 | gsGfsgCfaUfgAfagcAfgGfaAfcAfusUfsu | 192 |
| D-2013 | UfsgsUfuCfcUfgCfUfUfcAfuGfcCfcUfsusUf | 193 | asGfsgGfcAfuGfaagCfaGfgAfaCfasUfsu | 194 |
| D-2014 | GfsusUfcCfuGfcUfUfCfaUfgCfcCfuUfsusUf | 195 | asAfsgGfgCfaUfgaaGfcAfgGfaAfcsUfsu | 196 |
| D-2015 | UfsusCfcUfgCfuUfCfAfuGfcCfcUfuCfsusUf | 197 | gsAfsaGfgGfcAfugaAfgCfaGfgAfasUfsu | 198 |
| D-2016 | UfscsCfuGfcUfuCfAfUfgCfcCfuUfcUfsusUf | 199 | asGfsaAfgGfgCfaugAfaGfcAfgGfasUfsu | 200 |
| D-2017 | CfscsUfgCfuUfcAfUfGfcCfcUfuCfuAfsusUf | 201 | usAfsgAfaGfgGfcauGfaAfgCfaGfgsUfsu | 202 |
| D-2018 | CfsusGfcUfuCfaUfGfCfcCfuUfcUfaCfsusUf | 203 | gsUfsaGfaAfgGfgcaUfgAfaGfcAfgsUfsu | 204 |
| D-2019 | UfsgsCfuUfcAfuGfCfCfcUfuCfuAfcAfsusUf | 205 | usGfsuAfgAfaGfggcAfuGfaAfgCfasUfsu | 206 |
| D-2020 | GfscsUfuCfaUfgCfCfCfuUfcUfaCfaGfsusUf | 207 | csUfsgUfaGfaAfgggCfaUfgAfaGfcsUfsu | 208 |
| D-2021 | CfsusUfcAfuGfcCfCfUfuCfuAfcAfgUfsusUf | 209 | asCfsuGfuAfgAfaggGfcAfuGfaAfgsUfsu | 210 |
| D-2022 | UfsusCfaUfgCfcCfUfUfcUfaCfaGfuGfsusUf | 211 | csAfscUfgUfaGfaagGfgCfaUfgAfasUfsu | 212 |
| D-2023 | UfscsAfuGfcCfcUfUfCfuAfcAfgUfgGfsusUf | 213 | csCfsaCfuGfuAfgaaGfgGfcAfuGfasUfsu | 214 |
| D-2024 | CfsasUfgCfcCfuUfCfUfaCfaGfuGfgCfsusUf | 215 | gsCfscAfcUfgUfagaAfgGfgCfaUfgsUfsu | 216 |
| D-2025 | AfsusGfcCfcUfuCfUfAfcAfgUfgGfcCfsusUf | 217 | gsGfscCfaCfuGfuagAfaGfgGfcAfusUfsu | 218 |
| D-2026 | UfsgsCfcCfuUfcUfAfCfaGfuGfgCfcUfsusUf | 219 | asGfsgCfcAfcUfguaGfaAfgGfgCfasUfsu | 220 |
| D-2027 | GfscsCfcUfuCfuAfCfAfgUfgGfcCfuUfsusUf | 221 | asAfsgGfcCfaCfuguAfgAfaGfgGfcsUfsu | 222 |
| D-2028 | GfsgsUfaUfgUfuCfCfUfgCfuUfcAfuCfsusUf | 223 | gsAfsuGfaAfgCfaggAfaCfaUfaCfcsUfsu | 224 |
| D-2029 | GfsusAfuGfuUfcCfUfGfcUfuCfaUfcCfsusUf | 225 | gsGfsaUfgAfaGfcagGfaAfcAfuAfcsUfsu | 226 |
| D-2030 | UfsasUfgUfuCfcUfGfCfuUfcAfuCfcCfsusUf | 227 | gsGfsgAfuGfaAfgcaGfgAfaCfaUfasUfsu | 228 |
| D-2031 | AfsusGfuUfcCfuGfCfUfuCfaUfcCfcCfsusUf | 229 | gsGfsgGfaUfgAfagcAfgGfaAfcAfusUfsu | 230 |
| D-2032 | UfsgsUfuCfcUfgCfUfUfcAfuCfcCfcUfsusUf | 231 | asGfsgGfgAfuGfaagCfaGfgAfaCfasUfsu | 232 |
| D-2033 | GfsusUfcCfuGfcUfUfCfaUfcCfcCfuUfsusUf | 233 | asAfsgGfgGfaUfgaaGfcAfgGfaAfcsUfsu | 234 |
| D-2034 | UfsusCfcUfgCfuUfCfAfuCfcCfcUfuCfsusUf | 235 | gsAfsaGfgGfgAfugaAfgCfaGfgAfasUfsu | 236 |
| D-2035 | UfscsCfuGfcUfuCfAfUfcCfcCfuUfcUfsusUf | 237 | asGfsaAfgGfgGfaugAfaGfcAfgGfasUfsu | 238 |
| D-2036 | CfscsUfgCfuUfcAfUfCfcCfcUfuCfuAfsusUf | 239 | usAfsgAfaGfgGfgauGfaAfgCfaGfgsUfsu | 240 |
| D-2037 | CfsusGfcUfuCfaUfCfCfcCfuUfcUfaCfsusUf | 241 | gsUfsaGfaAfgGfggaUfgAfaGfcAfgsUfsu | 242 |
| D-2038 | UfsgsCfuUfcAfuCfCfCfcUfuCfuAfcAfsusUf | 243 | usGfsuAfgAfaGfgggAfuGfaAfgCfasUfsu | 244 |
| D-2039 | UfsusCfaUfcCfcCfUfUfcUfaCfaGfuGfsusUf | 245 | csAfscUfgUfaGfaagGfgGfaUfgAfasUfsu | 246 |
| D-2040 | UfscsAfuCfcCfcUfUfCfuAfcAfgUfgGfsusUf | 247 | csCfsaCfuGfuAfgaaGfgGfgAfuGfasUfsu | 248 |
| D-2041 | CfsasUfcCfcCfuUfCfUfaCfaGfuGfgCfsusUf | 249 | gsCfscAfcUfgUfagaAfgGfgGfaUfgsUfsu | 250 |
| D-2042 | UfscsCfcCfuUfcUfAfCfaGfuGfgCfcUfsusUf | 251 | asGfsgCfcAfcUfguaGfaAfgGfgGfasUfsu | 252 |
| D-2043 | GfsasUfcAfgGfaCfCfCfgAfgCfcGfaUfsusUf | 253 | asUfscGfgCfuCfgggUfcCfuGfaUfcsUfsu | 254 |
| D-2044 | UfsgsGfgCfuUfcUfAfCfcAfcGfuCfgUfsusUf | 255 | asCfsgAfcGfuGfguaGfaAfgCfcCfasUfsu | 256 |
| D-2045 | GfsasGfcGfaGfcAfCfGfcCfcCfgCfaUfsusUf | 257 | asUfsgCfgGfgGfcguGfcUfcGfcUfcsUfsu | 258 |
| D-2046 | UfsgsCfaCfuGfcGfUfCfgGfcGfuCfcUfsusUf | 259 | asGfsgAfcGfcCfgacGfcAfgUfgCfasUfsu | 260 |
| D-2047 | UfsgsGfaGfcAfgAfCfUfcUfgCfaGfgUfsusUf | 261 | asCfscUfgCfaGfaguCfuGfcUfcCfasUfsu | 262 |
| D-2048 | UfsgsCfaGfgUfcCfUfCfuCfaGfaUfcUfsusUf | 263 | asGfsaUfcUfgAfgagGfaCfcUfgCfasUfsu | 264 |
| D-2049 | CfscsCfgGfcCfaAfUfGfuCfcAfcCfaUfsusUf | 265 | asUfsgGfuGfgAfcauUfgGfcCfgGfgsUfsu | 266 |
| D-2050 | UfsusCfuAfcAfgUfGfGfcCfuUfaUfcUfsusUf | 267 | asGfsaUfaAfgGfccaCfuGfuAfgAfasUfsu | 268 |
| D-2051 | UfscsUfaCfaGfuGfGfCfcUfuAfuCfcUfsusUf | 269 | asGfsgAfuAfaGfgccAfcUfgUfaGfasUfsu | 270 |
| D-2052 | CfsusUfcCfuUfcAfGfAfgGfcGfuGfcUfsusUf | 271 | asGfscAfcGfcCfucuGfaAfgGfaAfgsUfsu | 272 |
| D-2053 | UfsusCfcUfuCfaGfAfGfgCfgUfgCfgAfsusUf | 273 | usCfsgCfaCfgCfcucUfgAfaGfgAfasUfsu | 274 |
| D-2054 | GfscsGfuGfcGfaUfAfUfgUfgGfaUfgUfsusUf | 275 | asCfsaUfcCfaCfauaUfcGfcAfcGfcsUfsu | 276 |
| D-2055 | CfsgsUfgCfgAfuAfUfGfuGfgAfuGfgAfsusUf | 277 | usCfscAfuCfcAfcauAfuCfgCfaCfgsUfsu | 278 |
| D-2056 | UfsgsGfaUfgGfaGfGfAfgUfgAfgUfgAfsusUf | 279 | usCfsaCfuCfaCfuccUfcCfaUfcCfasUfsu | 280 |
| D-2057 | AfscsGfuAfcCfcUfUfCfaUfuGfaUfgUfsusUf | 281 | asCfsaUfcAfaUfgaaGfgGfuAfcGfusUfsu | 282 |
| D-2058 | UfsgsGfaCfaUfcAfCfCfaAfgCfuCfaUfsusUf | 283 | asUfsgAfgCfuUfgguGfaUfgUfcCfasUfsu | 284 |
| D-2059 | CfsasCfcUfgCfgUfCfUfcAfgCfaUfcUfsusUf | 285 | asGfsaUfgCfuGfagaCfgCfaGfgUfgsUfsu | 286 |
| D-2060 | AfscsCfuGfcGfuCfUfCfaGfcAfuCfcUfsusUf | 287 | asGfsgAfuGfcUfgagAfcGfcAfgGfusUfsu | 288 |
| D-2061 | CfscsAfgAfgAfcUfGfGfuGfaCfaUfgUfsusUf | 289 | asCfsaUfgUfcAfccaGfuCfuCfuGfgsUfsu | 290 |
| D-2062 | AfsusGfgCfuUfcCfAfGfaUfaUfgCfcUfsusUf | 291 | asGfsgCfaUfaUfcugGfaAfgCfcAfusUfsu | 292 |
| D-2063 | CfscsGfcCfuCfcAfGfGfuCfcCfaAfaUfsusUf | 293 | asUfsuUfgGfgAfccuGfgAfgGfcGfgsUfsu | 294 |
| D-2064 | UfsasCfcUfgCfuGfGfUfgCfuGfaGfgUfsusUf | 295 | asCfscUfcAfgCfaccAfgCfaGfgUfasUfsu | 296 |
| D-2065 | AfscsCfuGfcUfgGfUfGfcUfgAfgGfgUfsusUf | 297 | asCfscCfuCfaGfcacCfaGfcAfgGfusUfsu | 298 |
| D-2066 | CfsusCfuCfcAfcCfUfUfuCfcCfaGfuUfsusUf | 299 | asAfscUfgGfgAfaagGfuGfgAfgAfgsUfsu | 300 |
| D-2067 | UfsusUfuUfcAfcCfUfAfaCfuAfaAfaUfsusUf | 301 | asUfsuUfuAfgUfuagGfuGfaAfaAfasUfsu | 302 |
| D-2068 | CfgGfcCfaAfuGfUfCfcAfcCfaGfcUfsusUf | 303 | asGfscUfgGfuGfgacAfuUfgGfcCfgsUfsu | 304 |
| D-2069 | GfgUfcCfaGfcCfUfGfaAfcUfuCfuUfsusUf | 305 | asAfsgAfaGfuUfcagGfcUfgGfaCfcsUfsu | 306 |
| D-2070 | GfcGfgCfuUfcCfUfGfgGfcUfuCfuAfsusUf | 307 | usAfsgAfaGfcCfcagGfaAfgCfcGfcsUfsu | 308 |
| D-2071 | GfuGfaCfaAfcGfUfAfcCfcUfuCfaUfsusUf | 309 | asUfsgAfaGfgGfuacGfuUfgUfcAfcsUfsu | 310 |
| D-2072 | GfgUfaUfgUfuCfCfUfgCfuUfcAfuGfsusUf | 311 | csAfsuGfaAfgCfaggAfaCfaUfaCfcsUfsu | 312 |
| D-2073 | GfuAfuGfuUfcCfUfGfcUfuCfaUfgCfsusUf | 313 | gsCfsaUfgAfaGfcagGfaAfcAfuAfcsUfsu | 314 |
| D-2074 | UfgUfuCfcUfgCfUfUfcAfuGfcCfcUfsusUf | 315 | asGfsgGfcAfuGfaagCfaGfgAfaCfasUfsu | 316 |
| D-2075 | GfuUfcCfuGfcUfUfCfaUfgCfcCfuUfsusUf | 317 | asAfsgGfgCfaUfgaaGfcAfgGfaAfcsUfsu | 318 |
| D-2076 | CfcUfgCfuUfcAfUfGfcCfcUfuCfuAfsusUf | 319 | usAfsgAfaGfgGfcauGfaAfgCfaGfgsUfsu | 320 |
| D-2077 | GfcUfuCfaUfgCfCfCfuUfcUfaCfaGfsusUf | 321 | csUfsgUfaGfaAfgggCfaUfgAfaGfcsUfsu | 322 |
| D-2078 | CfuUfcAfuGfcCfCfUfuCfuAfcAfgUfsusUf | 323 | asCfsuGfuAfgAfaggGfcAfuGfaAfgsUfsu | 324 |
| D-2079 | UfuCfaUfgCfcCfUfUfcUfaCfaGfuGfsusUf | 325 | csAfscUfgUfaGfaagGfgCfaUfgAfasUfsu | 326 |
| D-2080 | AfuGfgCfuUfcCfAfGfaUfaUfgCfcUfsusUf | 327 | asGfsgCfaUfaUfcugGfaAfgCfcAfusUfsu | 328 |
| D-2081 | AfuGfcCfcUfuCfUfAfcAfgUfgGfcCfsusUf | 329 | gsGfscCfaCfuGfuagAfaGfgGfcAfusUfsu | 330 |
| D-2082 | GfcUfuCfaUfgCfCfCfuUfcUfaCfaUfsusUf | 331 | asUfsgUfaGfaAfgggCfaUfgAfaGfcsUfsu | 332 |
| D-2083 | {Phosphate}GfsgsAfaAfgAfcUfGfUfuCfcAfaAfaAf | 1295 | {Phosphate}usUfsuUfuGfgAfacaGfuCfuUfuCfcsUf | 1296 |
| | susUf | | su | |
| D-2084 | {GalNAc3K2AhxC6}ggsuaugUfuCfCfUfGfcuucau | 1297 | {Phosphate}csAfsuGfaAfGfcaggAfaCfauaccsusu | 1298 |
| | gsusu | | | |
| D-2085 | {GalNAc3K2AhxC6}guauguUfcCfUfGfCfuucaugcs | 1299 | {Phosphate}gsCfsaUfgAfAfgcagGfaAfcauacsusu | 1300 |
| | usu | | | |
| D-2086 | {GalNAc3K2AhxC6}uguuccUfgCfUfUfCfaugcccus | 1301 | {Phosphate}asGfsgGfcAfUfgaagCfaGfgaacasusu | 1302 |
| | usu | | | |
| D-2087 | {GalNAc3K2AhxC6}gcuucaUfgCfCfCfUfucuacags | 1303 | {Phosphate}csUfsgUfaGfAfagggCfaUfgaagcsusu | 1304 |
| | usu | | | |
| D-2088 | {GalNAc3K2AhxC6}cuucauGfcCfCfUfUfcuacagus | 1305 | {Phosphate}asCfsuGfuAfGfaaggGfcAfugaagsusu | 1306 |
| | usu | | | |
| D-2089 | {GalNAc3K2AhxC6}gcggcuUfcCfUfGfGfgcuucuas | 1307 | {Phosphate}usAfsgAfaGfCfccagGfaAfgccgcsusu | 1308 |
| | usu | | | |
| D-2090 | {GalNAc3K2AhxC6}guuccuGfcUfUfCfAfugcccuus | 1309 | {Phosphate}asAfsgGfgCfAfugaaGfcAfggaacsusu | 1310 |
| | usu | | | |
| D-2091 | {GalNAc3K2AhxC6}AfuGfgCfuUfcCfAfGfaUfaUfg | 1311 | {Phosphate}asGfsgCfaUfaUfcugGfaAfgCfcAfusUfs | 1312 |
| | CfcUfsusUf | | u | |
| D-2092 | {GalNAc3K2AhxC6}ccugcuUfcAfUfGfCfccuucuas | 1313 | {Phosphate}usAfsgAfaGfGfgcauGfaAfgcaggsusu | 1314 |
| | usu | | | |
| D-2093 | {GalNAc3K2AhxC6}uucaugCfcCfUfUfCfuacaguus | 1315 | {Phosphate}asAfscUfgUfAfgaagGfgCfaugaasusu | 1316 |
| | usu | | | |
| D-2094 | {GalNAc3K2AhxC6}uucaugCfcCfUfUfCfuacagugs | 1317 | {Phosphate}csAfscUfgUfAfgaagGfgCfaugaasusu | 1318 |
| | usu | | | |
| D-2095 | {GalNAc3K2AhxC6}gcuucaUfgCfCfCfUfucuacaus | 1319 | {Phosphate}asUfsgUfaGfAfagggCfaUfgaagcsusu | 1320 |
| | usu | | | |
| D-2096 | {GalNAc3K2AhxC6}gguccaGfcCfUfGfAfacuucuus | 1321 | {Phosphate}asAfsgAfaGfUfucagGfcUfggaccsusu | 1322 |
| | usu | | | |
| D-2097 | {GalNAc3K2AhxC6}GfcGfgCfuUfcCfUfGfGfgcUfu | 1323 | {Phosphate}usAfsgAfaGfCfccagGfaAfgCfcGfcsUfs | 1324 |
| | CfuAfsusUf | | u | |
| D-2098 | {GalNAc3K2AhxC6}GfcGfgCfuUfcCfuGfGfgcUfuC | 1325 | {Phosphate}usAfsgAfaGfCfccAfgGfaAfgCfcGfcsUf | 1326 |
| | fuAfsusUf | | su | |
| D-2099 | {GalNAc3K2AhxC6}GfuUfcCfuGfcUfUfCfAfugCfc | 1327 | {Phosphate}asAfsgGfgCfAfugaaGfcAfgGfaAfcsUfs | 1328 |
| | CfuUfsusUf | | u | |
| D-2100 | {GalNAc3K2AhxC6}GfuUfcCfuGfcUfuCfAfugCfcC | 1329 | {Phosphate}asAfsgGfgCfAfugAfaGfcAfgGfaAfcsUf | 1330 |
| | fuUfsusUf | | su | |
| D-2101 | {GalNAc3K2AhxC6}CfcUfgCfuUfcAfUfGfCfccUfu | 1331 | {Phosphate}usAfsgAfaGfGfgcauGfaAfgCfaGfgsUfs | 1332 |
| | CfuAfsusUf | | u | |
| D-2102 | {GalNAc3K2AhxC6}CfcUfgCfuUfcAfuGfCfccUfuC | 1333 | {Phosphate}usAfsgAfaGfGfgcAfuGfaAfgCfaGfgsUf | 1334 |
| | fuAfsusUf | | su | |
| D-2103 | {GalNAc3K2AhxC6}augcccUfuCfUfAfCfaguggccs | 1335 | {Phosphate}gsGfscCfaCfUfguagAfaGfggcaususu | 1336 |
| | usu | | | |
| D-2104 | {GalNAc3K2AhxC6}auggcuUfcCfAfGfAfuaugccus | 1337 | {Phosphate}asGfsgCfaUfAfucugGfaAfgccaususu | 1338 |
| | usu | | | |
| D-2105 | {GalNAc3K2AhxC6}gugacaAfcGfUfAfCfccuucaus | 1339 | {Phosphate}asUfsgAfaGfGfguacGfuUfgucacsusu | 1340 |
| | usu | | | |
| D-2106 | {GalNAc3K2AhxC6}guauguUfcCfUfGfCfuucaugcs | 1341 | {Phosphate}gsCfsaUfgAfAfgcAfgGfaAfcauacsusu | 1342 |
| | usu | | | |
| D-2107 | {GalNAc3K2AhxC6}guauguUfcCfuGfCfuucaugcs | 1343 | {Phosphate}gsCfsaUfgAfAfgcagGfaAfcauacsusu | 1344 |
| | usu | | | |
| D-2108 | {GalNAc3K2AhxC6}guauguUfcCfuGfCfuucaugcs | 1345 | {Phosphate}gsCfsaUfgAfAfgcAfgGfaAfcauacsusu | 1346 |
| | usu | | | |
| D-2109 | {GalNAc3K2AhxC6}guauguUfcCfUfGfCfuucaugcs | 1347 | {Phosphate}asGfsgCfaUfgAfAfgcagGfaAfcauacsus | 1348 |
| | csu | | u | |
| D-2110 | {GalNAc3K2AhxC6}ugguauGfuUfCfCfUfgcuucau | 1349 | {Phosphate}gsCfsaUfgAfaGfCfaggaAfcAfuaccasus | 1350 |
| | sgsu | | u | |
| D-2111 | {GalNAc3K2AhxC6}guauguUfcCfUfGfCfuucausgs | 1351 | {Phosphate}gsCfsaUfgAfAfgcagGfaAfcauacsusu | 1352 |
| | u | | | |
| D-2112 | {GalNAc3K2AhxC6}guauguUfcCfUfGfCfuucaugcs | 1353 | {Phosphate}gsCfsaUfgAfAfgcagGfaAfcauacsusu | 1354 |
| | {invAb} | | | |
| D-2113 | {GalNAc3K2AhxC6}GfcUfuCfaUfgCfCfCfUfucUfa | 1355 | {Phosphate}asUfsgUfaGfAfagggCfaUfgAfaGfcsUfs | 1356 |
| | CfaUfsusUf | | u | |
| D-2114 | {GalNAc3K2AhxC6}GfcUfuCfaUfgCfcCfUfucUfaC | 1357 | {Phosphate}asUfsgUfaGfAfagGfgCfaUfgAfaGfcsU | 1358 |
| | faUfsusUf | | fsu | |
| D-2115 | {GalNAc3K2AhxC6}gcuucaUfgCfCfCfUfucuacaus | 1359 | {Phosphate}asusguaGfAfagggCfaUfgaagcsusu | 1360 |
| | usu | | | |
| D-2116 | {GalNAc3K2AhxC6}gcuucaUfgCfCfCfUfucUfaCfa | 1361 | {Phosphate}asusguaGfAfagggCfaUfgaagcsusu | 1362 |
| | UfsusUf | | | |
| D-2117 | {GalNAc3K2AhxC6}GfcUfuCfaUfgCfCfCfUfucuac | 1363 | {Phosphate}asusguaGfAfagggCfaUfgaagcsusu | 1364 |
| | aususu | | | |
| D-2118 | {GalNAc3K2AhxC6}gcuucaUfgCfCfCfUfucuacaus | 1365 | {Phosphate}asusguaGfAfagggCfaUfgAfaGfcsUfsu | 1366 |
| | usu | | | |
| D-2119 | {GalNAc3K2AhxC6}gcuucaUfgCfCfCfUfucuacaus | 1367 | {Phosphate}asUfsgUfaGfAfagggCfaUfgAfaGfcsUfs | 1368 |
| | usu | | u | |
| D-2120 | {GalNAc3K2AhxC6}GfcUfuCfaUfgCfCfCfUfucUfa | 1369 | {Phosphate}asusguaGfAfagggCfaUfgaagcsusu | 1370 |
| | CfaUfsusUf | | | |
| D-2121 | {GalNAc3K2AhxC6}GfcUfuCfaUfgCfCfCfUfucuac | 1371 | {Phosphate}asUfsgUfaGfAfagggCfaUfgaagcsusu | 1372 |
| | aususu | | | |
| D-2122 | {GalNAc3K2AhxC6}gcuucaUfgCfCfCfUfucUfaCfa | 1373 | {Phosphate}asusguaGfAfagggCfaUfgAfaGfcsUfsu | 1374 |
| | UfsusUf | | | |
| D-2123 | {GalNAc3K2AhxC6}gcuucaUfgCfCfCfUfucUfaCfa | 1375 | {Phosphate}asUfsgUfaGfAfagggCfaUfgaagcsusu | 1376 |
| | UfsusUf | | | |
| D-2124 | {GalNAc3K2AhxC6}GfcUfuCfaUfgCfCfCfUfucuac | 1377 | {Phosphate}asusguaGfAfagggCfaUfgAfaGfcsUfsu | 1378 |
| | aususu | | | |
| D-2125 | {GalNAc3K2AhxC6}GfcUfuCfaUfgCfCfCfUfucuac | 1379 | {Phosphate}asUfsgUfaGfAfagggCfaUfgAfaGfcsUfs | 1380 |
| | aususu | | u | |
| D-2126 | {GalNAc3K2AhxC6}gcuucaUfgCfCfCfUfucUfaCfa | 1381 | {Phosphate}asUfsgUfaGfAfagggCfaUfgAfaGfcsUfs | 1382 |
| | UfsusUf | | u | |
| D-2127 | {GalNAc3K2AhxC6}GfcUfuCfaUfgCfCfCfUfucUfa | 1383 | {Phosphate}asUfsgUfaGfAfagggCfaUfgaagcsusu | 1384 |
| | CfaUfsusUf | | | |
| D-2128 | {GalNAc3K2AhxC6}GfcUfuCfaUfgCfCfCfUfucUfa | 1385 | {Phosphate}asusguaGfAfagggCfaUfgAfaGfcsUfsu | 1386 |
| | CfaUfsusUf | | | |
| D-2129 | {GalNAc3K2AhxC6}gcuucaUfg[dC]CfCfuucuacau | 1387 | {Phosphate}asUfsgUfaGfAfagggCfaUfgaagcsusu | 1388 |
| | susu | | | |
| D-2130 | {GalNAc3K2AhxC6}gcuucaUfgCfCf[dC]Ufucuaca | 1389 | {Phosphate}asUfsgUfaGfAfagggCfaUfgaagcsusu | 1390 |
| | ususu | | | |
| D-2131 | {GalNAc3K2AhxC6}gcuucaUfgCf[dC]CfUfucuaca | 1391 | {Phosphate}asUfsgUfaGfAfagggCfaUfgaagcsusu | 1392 |
| | ususu | | | |
| D-2132 | {GalNAc3K2AhxC6}gcuucaUfgCfCfCfUfucuacaus | 1393 | {Phosphate}asUfsgUfaGfAfagGfgCfaUfgaagcsusu | 1394 |
| | usu | | | |
| D-2133 | {GalNAc3K2AhxC6}gcuucaUfgCfcCfUfucuacausu | 1395 | {Phosphate}asUfsgUfaGfAfagggCfaUfgaagcsusu | 1396 |
| | su | | | |
| D-2134 | {GalNAc3K2AhxC6}gcuucaUfgCfcCfUfucuacausu | 1397 | {Phosphate}asUfsgUfaGfAfagGfgCfaUfgaagcsusu | 1398 |
| | su | | | |
| D-2135 | {GalNAc3K2AhxC6}GfscsUfuCfaUfgCfcCfUfucUf | 1399 | {Phosphate}asUfsgUfaGfAfagggCfaUfgAfaGfcsUfs | 1400 |
| | aCfaUfsusUf | | u | |
| D-2136 | {GalNAc3K2AhxC6}GfscsUfuCfaUfgCfCfCfUfucUf | 1401 | {Phosphate}asUfsgUfaGfAfagGfgCfaUfgAfaGfcsU | 1402 |
| | aCfaUfsusUf | | fsu | |
| D-2137 | {GalNAc3K2AhxC6}gcuucaUfgCfCfCfUfucuacags | 1403 | {Phosphate}asAfscUfgUfaGfAfagggCfaUfgaagcsus | 1404 |
| | usu | | u | |
| D-2138 | {GalNAc3K2AhxC6}cugcuuCfaUfGfCfCfcuucuacs | 1405 | {Phosphate}asUfsgUfaGfaAfGfggcaUfgAfagcagsu | 1406 |
| | asu | | su | |
| D-2139 | {GalNAc3K2AhxC6}gcuucaUfgCfCfCfUfucuacsas | 1407 | {Phosphate}asUfsgUfaGfAfagggCfaUfgaagcsusu | 1408 |
| | u | | | |
| D-2140 | {GalNAc3K2AhxC6}gcuucaUfgCfCfCfUfucuacaus | 1409 | {Phosphate}asUfsgUfaGfAfagggCfaUfgaagcsusu | 1410 |
| | {invAb} | | | |
| D-2141 | {GalNAc3K2AhxC6}gcuucaUfgCfCfCfUfucuacauu | 1411 | {Phosphate}asUfsgUfaGfAfagggCfaUfgaagcsusu | 1412 |
| | us{invAb} | | | |
| D-2142 | {GalNAc3K2AhxC6}gcuucaUfgCfCfCfUfucuacaus | 1413 | {Phosphate}AfsusGfuAfgAfagggCfaUfgaagcsusu | 1414 |
| | usu | | | |
| D-2143 | {GalNAc3K2AhxC6}gcuucaUfgCfCfCfUfuCfuacau | 1415 | {Phosphate}AfsusGfuAfgAfagggCfaUfgaagcsusu | 1416 |
| | susu | | | |
| D-2144 | {GalNAc3K2AhxC6}gcuucaugCfCfCfUfucuacausu | 1417 | {Phosphate}asUfsgUfaGfAfagggCfaUfgaagcsusu | 1418 |
| | su | | | |
| D-2145 | {GalNAc3K2AhxC6}gcuucaUfgCfCfCfUfucuacaus | 1419 | {Phosphate}asUfsgUfaGfAfagggCfaugaagcsusu | 1420 |
| | usu | | | |
| D-2146 | {GalNAc3K2AhxC6}gcuucaUfgCfCfCfUfucuacaus | 1421 | {Phosphate}asusgUfaGfAfagggCfaUfgaagcsusu | 1422 |
| | usu | | | |
| D-2147 | {GalNAc3K2AhxC6}gcuucaUfgCfCfCfUfucuacaus | 1423 | {Phosphate}asUfsgUfagAfagggCfaUfgaagcsusu | 1424 |
| | usu | | | |
| D-2148 | {GalNAc3K2AhxC6}gcuucaUfgCfCfCfUfucuacaus | 1425 | {Phosphate}asusgUfagAfagggCfaUfgaagcsusu | 1426 |
| | usu | | | |
| D-2149 | {GalNAc3K2AhxC6}gcuucaUfgCfCfCfUfucuacaus | 1427 | {Phosphate}asUfsguagAfagggCfaUfgaagcsusu | 1428 |
| | usu | | | |
| D-2150 | {GalNAc3K2AhxC6}gcuucaUfgCfCfCfUfucuacaus | 1429 | {Phosphate}asusguagAfagggCfaUfgaagcsusu | 1430 |
| | usu | | | |
| D-2151 | {GalNAc3K2AhxC6}guauguUfcCfUfGfCfuucaugc | 1431 | {Phosphate}gsCfsaUfgAfAfgcagGfaAfcauacsusu | 1432 |
| | uus{invAb} | | | |
| D-2152 | {GalNAc3K2AhxC6}gguaugUfuCfCfUfGfcuucauu | 1433 | {Phosphate}aAfsuGfaAfGfcaggAfaCfauaccsusu | 1434 |
| | susu | | | |
| D-2153 | {GalNAc3K2AhxC6}guauguUfcCfUfGfCfuucaugu | 1435 | {Phosphate}asCfsaUfgAfAfgcagGfaAfcauacsusu | 1436 |
| | susu | | | |
| D-2154 | {GalNAc3K2AhxC6}cggccaAfuGfUfCfCfaccagcus | 1437 | {Phosphate}asGfscUfgGfUfggacAfuUfggccgsusu | 1438 |
| | usu | | | |
| D-2155 | {GalNAc3K2AhxC6}uggagcAfgAfCfUfCfugcaggus | 1439 | {Phosphate}asCfscUfgCfAfgaguCfuGfcuccasusu | 1440 |
| | usu | | | |
| D-2156 | {GalNAc3K2AhxC6}acguacCfcUfUfCfAfuugaugus | 1441 | {Phosphate}aCfsaUfcAfAfugaaGfgGfuacgususu | 1442 |
| | usu | | | |
| D-2157 | {GalNAc3K2AhxC6}ccagagAfcUfGfGfUfgacaugus | 1443 | {Phosphate}asCfsaUfgUfCfaccaGfuCfucuggsusu | 1444 |
| | usu | | | |
| D-2158 | {GalNAc3K2AhxC6}[invAb]gcuucaUfgCfCfUfUfu | 1445 | {Phosphate}asUfsgUfaGfAfaaggCfaUfgaagcsusu | 1446 |
| | cuacaususu | | | |
| D-2159 | {GalNAc3K2AhxC6}[invAb]gcuucaUfgCfCfUfUfu | 1447 | {Phosphate}asAfsaUfgUfaGfAfaaggCfaUfgaagcsu | 1448 |
| | cuacaususu | | su | |
| D-2160 | {GalNAc3K2AhxC6}[invAb]gcuucaUfgCfcUfUfUf | 1449 | {Phosphate}asAfsaUfgUfAfgaaaGfgCfaUfgaagcsu | 1450 |
| | Cfuacaususu | | su | |
| D-2161 | {GalNAc3K2AhxC6}ugcuucAfuGfCfCfUfuucuacas | 1451 | {Phosphate}usGfsuAfgAfAfaggcAfuGfaagcasusu | 1452 |
| | usu | | | |
| D-2162 | {GalNAc3K2AhxC6}uauguuCfcUfGfCfUfucaugcu | 1453 | {Phosphate}asGfscAfuGfAfagcaGfgAfacauasusu | 1454 |
| | susu | | | |
| D-2163 | {GalNAc3K2AhxC6}uuccugCfuUfCfAfUfgccuuuus | 1455 | {Phosphate}asAfsaAfgGfCfaugaAfgCfaggaasusu | 1456 |
| | usu | | | |
| D-2164 | {GalNAc3K2AhxC6}ucaugcCfuUfUfCfUfacagugus | 1457 | {Phosphate}asCfsaCfuGfUfagaaAfgGfcaugasusu | 1458 |
| | usu | | | |
| D-2165 | {GalNAc3K2AhxC6}caugccUfuUfCfUfAfcaguggus | 1459 | {Phosphate}asCfscAfcUfGfuagaAfaGfgcaugsusu | 1460 |
| | usu | | | |
| D-2166 | {GalNAc3K2AhxC6}augccuUfuCfUfAfCfaguggcus | 1461 | {Phosphate}asGfscCfaCfUfguagAfaAfggcaususu | 1462 |
| | usu | | | |
| D-2167 | {GalNAc3K2AhxC6}gguaugUfuCfCfUfGfcuucaua | 1463 | {Phosphate}usAfsuGfaAfGfcaggAfaCfauaccsusu | 1464 |
| | susu | | | |
| D-2168 | {GalNAc3K2AhxC6}guauguUfcCfUfGfCfuucauga | 1465 | {Phosphate}usCfsaUfgAfAfgcagGfaAfcauacsusu | 1466 |
| | susu | | | |
| D-2169 | {GalNAc3K2AhxC6}uauguuCfcUfGfCfUfucaugcas | 1467 | {Phosphate}usGfscAfuGfAfagcaGfgAfacauasusu | 1468 |
| | usu | | | |
| D-2170 | {GalNAc3K2AhxC6}uuccugCfuUfCfAfUfgccuuuas | 1469 | {Phosphate}usAfsaAfgGfCfaugaAfgCfaggaasusu | 1470 |
| | usu | | | |
| D-2171 | {GalNAc3K2AhxC6}cugcuuCfaUfGfCfCfuuucuaas | 1471 | {Phosphate}usUfsaGfaAfAfggcaUfgAfagcagsusu | 1472 |
| | usu | | | |
| D-2172 | {GalNAc3K2AhxC6}gcuucaUfgCfCfUfUfucuacaas | 1473 | {Phosphate}usUfsgUfaGfAfaaggCfaUfgaagcsusu | 1474 |
| | usu | | | |
| D-2173 | {GalNAc3K2AhxC6}uucaugCfcUfUfUfCfuacaguas | 1475 | {Phosphate}usAfscUfgUfAfgaaaGfgCfaugaasusu | 1476 |
| | usu | | | |
| D-2174 | {GalNAc3K2AhxC6}ucaugcCfuUfUfCfUfacagugas | 1477 | {Phosphate}usCfsaCfuGfUfagaaAfgGfcaugasusu | 1478 |
| | usu | | | |
| D-2175 | {GalNAc3K2AhxC6}caugccUfuUfCfUfAfcaguggas | 1479 | {Phosphate}usCfscAfcUfGfuagaAfaGfgcaugsusu | 1480 |
| | usu | | | |
| D-2176 | {GalNAc3K2AhxC6}augccuUfuCfUfAfCfaguggcas | 1481 | {Phosphate}usGfscCfaCfUfguagAfaAfggcaususu | 1482 |
| | usu | | | |
| D-2177 | {GalNAc3K2AhxC6}acguacCfcUfUfCfAfuugaugas | 1483 | {Phosphate}usCfsaUfcAfAfugaaGfgGfuacgususu | 1484 |
| | usu | | | |
| D-2178 | {GalNAc3K2AhxC6}ccagagAfcUfGfGfUfgacaugas | 1485 | {Phosphate}usCfsaUfgUfCfaccaGfuCfucuggsusu | 1486 |
| | usu | | | |
| D-2179 | {GalNAc3K2AhxC6}auggcuUfcCfAfGfAfuaugccas | 1487 | {Phosphate}usGfsgCfaUfAfucugGfaAfgccaususu | 1488 |
| | usu | | | |
| D-2180 | {GalNAc3K2AhxC6}guuccuGfcUfUfCfAfugccuuus | 1489 | {Phosphate}asAfsaGfgCfAfugaaGfcAfggaacsusu | 1490 |
| | usu | | | |
| D-2181 | {GalNAc3K2AhxC6}ccugcuUfcAfUfGfCfcuuucuas | 1491 | {Phosphate}usAfsgAfaAfGfgcauGfaAfgcaggsusu | 1492 |
| | usu | | | |
| D-2182 | {GalNAc3K2AhxC6}gcuucaUfgCfCfUfUfucuacaus | 1493 | {Phosphate}asUfsgUfaGfAfaaggCfaUfgaagcsusu | 1494 |
| | usu | | | |
| D-2183 | {GalNAc3K2AhxC6}cuucauGfcCfUfUfUfcuacagus | 1495 | {Phosphate}asCfsuGfuAfGfaaagGfcAfugaagsusu | 1496 |
| | usu | | | |
| D-2184 | {GalNAc3K2AhxC6}uucaugCfcUfUfUfCfuacaguu | 1497 | {Phosphate}asAfscUfgUfAfgaaaGfgCfaugaasusu | 1498 |
| | susu | | | |
| D-2185 | {GalNAc3K2AhxC6}gcuucaUfcCfCfUfUfucuacaus | 1499 | {Phosphate}asUfsgUfaGfAfaaggGfaUfgaagcsusu | 1500 |
| | usu | | | |
| D-2186 | {GalNAc3K2AhxC6}[invAb]gcuucaUfgCfCfCfUfuc | 1501 | {Phosphate}asUfsgUfaGfAfagggCfaUfgaagcsusu | 1502 |
| | uacaususu | | | |
| D-2187 | {GalNAc3K2AhxC6}[invAb]gcuucaUfgCfCfCfUfuc | 1503 | {Phosphate}asAfsaUfgUfaGfAfagggCfaUfgaagcsus | 1504 |
| | uacaususu | | u | |
| D-2188 | {GalNAc3K2AhxC6}[invAb]gcuucaUfgCfcCfUfUf | 1505 | {Phosphate}asAfsaUfgUfAfgaagGfgCfaUfgaagcsus | 1506 |
| | Cfuacaususu | | u | |
| D-2189 | {GalNAc3K2AhxC6}[invAb]gcggcuUfcCfUfGfGfgc | 1507 | {Phosphate}usAfsgAfaGfCfccagGfaAfgccgcsusu | 1508 |
| | uucuasusu | | | |
| D-2190 | {GalNAc3K2AhxC6}[invAb]CfuGfcGfgCfuUfcCfu | 1509 | {Phosphate}usAfsgAfaGfCfccAfgGfaAfgCfcGfcAfg | 1510 |
| | GfGfgcUfuCfsusAf | | sUfsu | |
| D-2191 | {GalNAc3K2AhxC6}cugcggCfuUfCfCfUfgggcuucu | 1511 | {Phosphate}usAfsgAfaGfcCfCfaggaAfgCfcgcagsus | 1512 |
| | s{invAb} | | u | |
| D-2192 | {GalNAc3K2AhxC6}[invAb]cugcggCfuUfCfCfUfgg | 1513 | {Phosphate}usAfsgAfaGfcCfCfaggaAfgCfcgcagsus | 1514 |
| | gcuucsusa | | u | |
| D-2193 | {GalNAc3K2AhxC6}[invAb]gcggcuUfcCfUfGfGfgc | 1515 | {Phosphate}usAfsgAfaGfCfccagGfaAfgccgcsusu | 1516 |
| | UfuCfuAfsusUf | | | |
| D-2194 | {GalNAc3K2AhxC6}cugcggCfuUfCfCfUfggGfcUfu | 1517 | {Phosphate}usAfsgAfaGfcCfCfaggaAfgCfcgcagsus | 1518 |
| | Cfus{invAb} | | u | |
| D-2195 | {GalNAc3K2AhxC6}[invAb]cugcggCfuUfCfCfUfgg | 1519 | {Phosphate}usAfsgAfaGfcCfCfaggaAfgCfcgcagsus | 1520 |
| | GfcUfuCfsusAf | | u | |
| D-2196 | {GalNAc3K2AhxC6}[invAb]GfcGfgCfuUfcCfuGfGf | 1521 | {Phosphate}usAfsgAfaGfCfccAfgGfaAfgCfcGfcsUf | 1522 |
| | gcUfuCfuAfsusUf | | su | |
| D-2197 | {GalNAc3K2AhxC6}CfuGfcGfgCfuUfcCfUfggGfcU | 1523 | {Phosphate}usAfsgAfaGfcCfCfagGfaAfgCfcGfcAfg | 1524 |
| | fuCfus{invAb} | | sUfsu | |
| D-2198 | {GalNAc3K2AhxC6}[invAb]CfuGfcGfgCfuUfcCfUf | 1525 | {Phosphate}usAfsgAfaGfcCfCfagGfaAfgCfcGfcAfg | 1526 |
| | ggGfcUfuCfsusAf | | sUfsu | |
| D-2199 | {GalNAc3K2AhxC6}[invAb]GfcGfgCfuUfcCfUfGf | 1527 | {Phosphate}usAfsgAfaGfCfccagGfaAfgCfcGfcsUfs | 1528 |
| | Gfgcuucuasusu | | u | |
| D-2200 | {GalNAc3K2AhxC6}[invAb]CfuGfcGfgCfuUfCfCfU | 1529 | {Phosphate}usAfsgAfaGfcCfCfaggaAfgCfcGfcAfgs | 1530 |
| | fgggcuucsusa | | Ufsu | |
| D-2201 | {GalNAc3K2AhxC6}[invAb]cugcggcuUfcCfUfGfGf | 1531 | {Phosphate}usAfsgAfaGfCfccagGfaAfgccgcagsusu | 1532 |
| | gcUfuCfusAf | | | |
| D-2202 | {GalNAc3K2AhxC6}[invAb]CfuGfcGfgCfuUfcCfUf | 1533 | {Phosphate}usAfsgAfaGfCfccagGfaAfgCfcGfcAfgs | 1534 |
| | GfGfgcuucsusa | | Ufsu | |
| D-2203 | {GalNAc3K2AhxC6}[invAb]auggcuUfcCfAfGfAfu | 1535 | {Phosphate}asGfsgCfaUfAfucugGfaAfgccaususu | 1536 |
| | augccususu | | | |
| D-2204 | {GalNAc3K2AhxC6}[invAb]AfcAfuGfgCfuUfcCfa | 1537 | {Phosphate}asGfsgCfaUfAfucUfgGfaAfgCfcAfuGf | 1538 |
| | GfAfuaUfgCfscsUf | | usUfsu | |
| D-2205 | {GalNAc3K2AhxC6}acauggCfuUfCfCfAfgauaugcc | 1539 | {Phosphate}asGfsgCfaUfaUfCfuggaAfgCfcaugusus | 1540 |
| | s{invAb} | | u | |
| D-2206 | {GalNAc3K2AhxC6}[invAb]acauggCfuUfCfCfAfga | 1541 | {Phosphate}asGfsgCfaUfaUfCfuggaAfgCfcaugusus | 1542 |
| | uaugcscsu | | u | |
| D-2207 | {GalNAc3K2AhxC6}[invAb]auggcuUfcCfAfGfAfu | 1543 | {Phosphate}asGfsgCfaUfAfucugGfaAfgccaususu | 1544 |
| | aUfgCfcUfsusUf | | | |
| D-2208 | {GalNAc3K2AhxC6}acauggCfuUfCfCfAfgaUfaUfg | 1545 | {Phosphate}asGfsgCfaUfaUfCfuggaAfgCfcaugusus | 1546 |
| | Cfcs{invAb} | | u | |
| D-2209 | {GalNAc3K2AhxC6}[invAb]acauggCfuUfCfCfAfga | 1547 | {Phosphate}asGfsgCfaUfaUfCfuggaAfgCfcaugusus | 1548 |
| | UfaUfgCfscsUf | | u | |
| D-2210 | {GalNAc3K2AhxC6}[invAb]AfuGfgCfuUfcCfaGfAf | 1549 | {Phosphate}asGfsgCfaUfAfucUfgGfaAfgCfcAfusUf | 1550 |
| | uaUfgCfcUfsusUf | | su | |
| D-2211 | {GalNAc3K2AhxC6}AfcAfuGfgCfuUfcCfAfgaUfaU | 1551 | {Phosphate}asGfsgCfaUfaUfCfugGfaAfgCfcAfuGf | 1552 |
| | fgCfcs{invAb} | | usUfsu | |
| D-2212 | {GalNAc3K2AhxC6}[invAb]AfcAfuGfgCfuUfcCfAf | 1553 | {Phosphate}asGfsgCfaUfaUfCfugGfaAfgCfcAfuGf | 1554 |
| | gaUfaUfgCfscsUf | | usUfsu | |
| D-2213 | {GalNAc3K2AhxC6}[invAb]AfuGfgCfuUfcCfAfGf | 1555 | {Phosphate}asGfsgCfaUfAfucugGfaAfgCfcAfusUfs | 1556 |
| | Afuaugccususu | | u | |
| D-2214 | {GalNAc3K2AhxC6}AfcAfuGfgCfuUfCfCfAfgauau | 1557 | {Phosphate}asGfsgCfaUfaUfCfuggaAfgCfcAfuGfus | 1558 |
| | gccs{invAb} | | Ufsu | |
| D-2215 | {GalNAc3K2AhxC6}[invAb]AfcAfuGfgCfuUfCfCfA | 1559 | {Phosphate}asGfsgCfaUfaUfCfuggaAfgCfcAfuGfus | 1560 |
| | fgauaugcscsu | | Ufsu | |
| D-2216 | {GalNAc3K2AhxC6}[invAb]acauggcuUfcCfAfGfAf | 1561 | {Phosphate}asGfsgCfaUfAfucugGfaAfgccaugusus | 1562 |
| | uaugcscsu | | u | |
| D-2217 | {GalNAc3K2AhxC6}[invAb]acauggcuUfcCfAfGfAf | 1563 | {Phosphate}asGfsgCfaUfAfucugGfaAfgccaugusus | 1564 |
| | uaUfgCfcsUf | | u | |
| D-2218 | {GalNAc3K2AhxC6}[invAb]AfcAfuGfgCfuUfcCfAf | 1565 | {Phosphate}asGfsgCfaUfAfucugGfaAfgCfcAfuGfus | 1566 |
| | GfAfuaugcscsu | | Ufsu | |
| D-2219 | {GalNAc3K2AhxC6}[invAb]acguacCfcUfUfCfAfuu | 1567 | {Phosphate}asCfsaUfcAfAfugaaGfgGfuacgususu | 1568 |
| | gaugususu | | | |
| D-2220 | {GalNAc3K2AhxC6}[invAb]CfaAfcGfuAfcCfcUfuC | 1569 | {Phosphate}asCfsaUfcAfAfugAfaGfgGfuAfcGfuUf | 1570 |
| | fAfuuGfaUfsgsUf | | gsUfsu | |
| D-2221 | {GalNAc3K2AhxC6}[invAb]caacguAfcCfCfUfUfca | 1571 | {Phosphate}asCfsaUfcAfaUfGfaaggGfuAfcguugsu | 1572 |
| | uugausgsu | | su | |
| D-2222 | {GalNAc3K2AhxC6}[invAb]acguacCfcUfUfCfAfuu | 1573 | {Phosphate}asCfsaUfcAfAfugaaGfgGfuacgususu | 1574 |
| | GfaUfgUfsusUf | | | |
| D-2223 | {GalNAc3K2AhxC6}caacguAfcCfCfUfUfcaUfuGfa | 1575 | {Phosphate}asCfsaUfcAfaUfGfaaggGfuAfcguugsu | 1576 |
| | Ufgs{invAb} | | su | |
| D-2224 | {GalNAc3K2AhxC6}[invAb]AfcGfuAfcCfcUfuCfAf | 1577 | {Phosphate}asCfsaUfcAfAfugAfaGfgGfuAfcGfusUf | 1578 |
| | uuGfaUfgUfsusUf | | su | |
| D-2225 | {GalNAc3K2AhxC6}CfaAfcGfuAfcCfcUfUfcaUfuG | 1579 | {Phosphate}asCfsaUfcAfaUfGfaaGfgGfuAfcGfuUf | 1580 |
| | faUfgs{invAb} | | gsUfsu | |
| D-2226 | {GalNAc3K2AhxC6}[invAb]CfaAfcGfuAfcCfcUfUf | 1581 | {Phosphate}asCfsaUfcAfaUfGfaaGfgGfuAfcGfuUf | 1582 |
| | caUfuGfaUfsgsUf | | gsUfsu | |
| D-2227 | {GalNAc3K2AhxC6}[invAb]AfcGfuAfcCfcUfUfCfA | 1583 | {Phosphate}asCfsaUfcAfAfugaaGfgGfuAfcGfusUfs | 1584 |
| | fuugaugususu | | u | |
| D-2228 | {GalNAc3K2AhxC6}CfaAfcGfuAfcCfCfUfUfcauug | 1585 | {Phosphate}asCfsaUfcAfaUfGfaaggGfuAfcGfuUfg | 1586 |
| | augs{invAb} | | sUfsu | |
| D-2229 | {GalNAc3K2AhxC6}[invAb]CfaAfcGfuAfcCfCfUfU | 1587 | {Phosphate}asCfsaUfcAfaUfGfaaggGfuAfcGfuUfg | 1588 |
| | fcauugausgsu | | sUfsu | |
| D-2230 | {GalNAc3K2AhxC6}[invAb]caacguacCfcUfUfCfAf | 1589 | {Phosphate}asCfsaUfcAfAfugaaGfgGfuacguugsus | 1590 |
| | uugausgsu | | u | |
| D-2231 | {GalNAc3K2AhxC6}[invAb]caacguacCfcUfUfCfAf | 1591 | {Phosphate}asCfsaUfcAfAfugaaGfgGfuacguugsus | 1592 |
| | uuGfaUfgsUf | | u | |
| D-2232 | {GalNAc3K2AhxC6}[invAb]CfaAfcGfuAfcCfcUfUf | 1593 | {Phosphate}asCfsaUfcAfAfugaaGfgGfuAfcGfuUfg | 1594 |
| | CfAfuugausgsu | | sUfsu | |
| D-2233 | {GalNAc3K2AhxC6}cugcuucaUfgCfCfUfUfucuacs | 1595 | {Phosphate}asUfsgUfaGfAfaaggCfaUfgaagcagsus | 1596 |
| | asu | | u | |
| D-2234 | {GalNAc3K2AhxC6}cugcuucaUfgCfCfUfUfucUfaC | 1597 | {Phosphate}asUfsgUfaGfAfaaggCfaUfgaagcagsus | 1598 |
| | fsasUf | | u | |
| D-2235 | {GalNAc3K2AhxC6}[invAb]GfcUfuCfaUfgCfcUfUf | 1599 | {Phosphate}asUfsgUfaGfAfaaGfgCfaUfgAfaGfcsU | 1600 |
| | ucUfaCfaUfsusUf | | fsu | |
| D-2236 | {GalNAc3K2AhxC6}[invAb]GfcUfuCfaUfgCfCfUf | 1601 | {Phosphate}asUfsgUfaGfAfaaggCfaUfgAfaGfcsUfs | 1602 |
| | Ufucuacaususu | | u | |
| D-2237 | {GalNAc3K2AhxC6}CfuGfcUfuCfaUfgCfcUfUfucU | 1603 | {Phosphate}asUfsgUfaGfAfaaGfgCfaUfgAfaGfcAf | 1604 |
| | faCfsasUf | | gsUfsu | |
| D-2238 | {GalNAc3K2AhxC6}CfuGfcUfuCfaUfgCfCfUfUfuc | 1605 | {Phosphate}asUfsgUfaGfAfaaggCfaUfgAfaGfcAfgs | 1606 |
| | uacsasu | | Ufsu | |
| D-2239 | {GalNAc3K2AhxC6}[invAb]CfuGfcUfuCfaUfgCfCf | 1607 | {Phosphate}asUfsgUfaGfAfaaggCfaUfgAfaGfcAfgs | 1608 |
| | UfUfucuacsasu | | Ufsu | |
| D-2240 | {GalNAc3K2AhxC6}CfuGfcUfuCfaUfgCfCfUfUfuc | 1609 | {Phosphate}asUfsgUfaGfAfaaggCfaUfgaagcagsus | 1610 |
| | uacas{invAb} | | u | |
| D-2241 | {GalNAc3K2AhxC6}[invAb]CfuGfcUfuCfaUfgCfCf | 1611 | {Phosphate}asUfsgUfaGfAfaaggCfaUfgaagcagsus | 1612 |
| | UfUfucuacsasu | | u | |
| D-2242 | {GalNAc3K2AhxC6}[invAb]cugcuucaUfgCf[dC]Uf | 1613 | {Phosphate}asUfsgUfaGfAfaaggCfaUfgaagcagsus | 1614 |
| | Ufucuacsasu | | u | |
| D-2243 | {GalNAc3K2AhxC6}cugcuucaUfgCfCfUfUfucuacs | 1615 | {Phosphate}asUfsgUfaGfAfaaGfgCfaUfgaagcagsu | 1616 |
| | asu | | su | |
| D-2244 | {GalNAc3K2AhxC6}[invAb]cugcuucaUfgCfCfUfU | 1617 | {Phosphate}asUfsgUfaGfAfaaGfgCfaUfgaagcagsu | 1618 |
| | fucuacsasu | | su | |
| D-2245 | {GalNAc3K2AhxC6}cugcuucaUfgCfcUfUfucuacsa | 1619 | {Phosphate}asUfsgUfaGfAfaaggCfaUfgaagcagsus | 1620 |
| | su | | u | |
| D-2246 | {GalNAc3K2AhxC6}cugcuucaUfgCfcUfUfucuacas | 1621 | {Phosphate}asUfsgUfaGfAfaaggCfaUfgaagcagsus | 1622 |
| | {invAb} | | u | |
| D-2247 | {GalNAc3K2AhxC6}[invAb]cugcuucaUfgCfcUfUf | 1623 | {Phosphate}asUfsgUfaGfAfaaggCfaUfgaagcagsus | 1624 |
| | ucuacsasu | | u | |
| D-2248 | {GalNAc3K2AhxC6}cugcuucaUfgCfCfUfUfucuacs | 1625 | {Phosphate}asUfsgUfagAfaaggCfaUfgaagcagsusu | 1626 |
| | asu | | | |
| D-2249 | {GalNAc3K2AhxC6}cugcuucaUfgCfCfUfUfucuaca | 1627 | {Phosphate}asUfsgUfagAfaaggCfaUfgaagcagsusu | 1628 |
| | s{invAb} | | | |
| D-2250 | {GalNAc3K2AhxC6}[invAb]cugcuucaUfgCfCfUfU | 1629 | {Phosphate}asUfsgUfagAfaaggCfaUfgaagcagsusu | 1630 |
| | fucuacsasu | | | |
| D-2251 | {GalNAc3K2AhxC6}cugcuucaUfgCfCfUfUfucuaca | 1631 | {Phosphate}asUfsguagAfaaggCfaUfgaagcagsusu | 1632 |
| | s{invAb} | | | |
| D-2252 | {GalNAc3K2AhxC6}[invAb]cugcuucaUfgCfCfUfU | 1633 | {Phosphate}asUfsguagAfaaggCfaUfgaagcagsusu | 1634 |
| | fucuacsasu | | | |
| D-2253 | {GalNAc3K2AhxC6}[invAb]GfcUfuCfaUfgCfcUfUf | 1635 | {Phosphate}asUfsgUfagAfaaGfgCfaUfgAfaGfcsUfs | 1636 |
| | ucUfaCfaUfsusUf | | u | |
| D-2254 | {GalNAc3K2AhxC6}[invAb]GfcUfuCfaUfgCfCfUf | 1637 | {Phosphate}asUfsgUfagAfaaggCfaUfgAfaGfcsUfsu | 1638 |
| | Ufucuacaususu | | | |
| D-2255 | {GalNAc3K2AhxC6}[invAb]GfcUfuCfaUfgCfCfUf | 1639 | {Phosphate}asUfsgUfagAfaaggCfaUfgaagcsusu | 1640 |
| | Ufucuacaususu | | | |
| D-2256 | {GalNAc3K2AhxC6}[invAb]gcuucaUfgCfCfUfUfu | 1641 | {Phosphate}asUfsgUfagAfaaGfgCfaUfgaagcsusu | 1642 |
| | cuacaususu | | | |
| D-2257 | {GalNAc3K2AhxC6}[invAb]gcuucaUfgCfcUfUfuc | 1643 | {Phosphate}asUfsgUfagAfaaGfgCfaUfgaagcsusu | 1644 |
| | uacaususu | | | |
| D-2258 | {GalNAc3K2AhxC6}cugcuucaUfgCfCfCfUfucuacs | 1645 | {Phosphate}asUfsgUfaGfAfagggCfaUfgaagcagsus | 1646 |
| | asu | | u | |
| D-2259 | {GalNAc3K2AhxC6}[invAb]gcuucaUfgCfCfCfUfuc | 1647 | {Phosphate}asUfsgUfaGfAfagggCfaUfgaagcsusu | 1648 |
| | UfaCfaUfsusUf | | | |
| D-2260 | {GalNAc3K2AhxC6}[invAb]GfcUfuCfaUfgCfcCfUf | 1649 | {Phosphate}asUfsgUfaGfAfagGfgCfaUfgAfaGfcsU | 1650 |
| | ucUfaCfaUfsusUf | | fsu | |
| D-2261 | {GalNAc3K2AhxC6}[invAb]GfcUfuCfaUfgCfCfCfU | 1651 | {Phosphate}asUfsgUfaGfAfagggCfaUfgAfaGfcsUfs | 1652 |
| | fucuacaususu | | u | |
| D-2262 | {GalNAc3K2AhxC6}cugcuucaUfgCfCfCfUfucuaca | 1653 | {Phosphate}asUfsgUfaGfAfagggCfaUfgaagcagsus | 1654 |
| | s{invAb} | | u | |
| D-2263 | {GalNAc3K2AhxC6}[invAb]cugcuucaUfgCfCfCfUf | 1655 | {Phosphate}asUfsgUfaGfAfagggCfaUfgaagcagsus | 1656 |
| | ucuacsasu | | u | |
| D-2264 | {GalNAc3K2AhxC6}[invAb]GfcUfuCfaUfgCfCfCfU | 1657 | {Phosphate}asUfsgUfaGfAfagggCfaUfgaagcsusu | 1658 |
| | fucuacaususu | | | |
| D-2265 | {GalNAc3K2AhxC6}auguucCfuGfCfUfUfcaugccus | 1659 | {Phosphate}asGfsgCfaUfGfaagcAfgGfaacaususu | 1660 |
| | usu | | | |
| D-2266 | {GalNAc3K2AhxC6}uguuccUfgCfUfUfCfaugccuus | 1661 | {Phosphate}asAfsgGfcAfUfgaagCfaGfgaacasusu | 1662 |
| | usu | | | |
| D-2267 | {GalNAc3K2AhxC6}ugccuuUfcUfAfCfAfguggccus | 1663 | {Phosphate}asGfsgCfcAfCfuguaGfaAfaggcasusu | 1664 |
| | usu | | | |
| D-2268 | {Biotin-C6}cguacuUfcGfUfCfCfuuguaugsusu | 1665 | {Phosphate}csAfsuAfcAfAfggacGfaAfguacgsusu | 1666 |
| D-2269 | {GalNAc3K2AhxC6}[invAb]gcuucaUfgCf[dC]CfUf | 1667 | {Phosphate}asUfsgUfaGfAfagggCfaUfgaagcsusu | 1668 |
| | ucuacaususu | | | |
| D-2270 | {GalNAc3K2AhxC6}[invAb]gcuucaUfgCfCfCfUfuc | 1669 | {Phosphate}asUfsgUfaGfAfagGfgCfaUfgaagcsusu | 1670 |
| | uacaususu | | | |
| D-2271 | {GalNAc3K2AhxC6}[invAb]gcuucaUfgCfcCfUfuc | 1671 | {Phosphate}asUfsgUfaGfAfagggCfaUfgaagcsusu | 1672 |
| | uacaususu | | | |
| D-2272 | {GalNAc3K2AhxC6}[invAb]gcuucaUfgCfCfCfUfuc | 1673 | {Phosphate}asUfsgUfagAfagggCfaUfgaagcsusu | 1674 |
| | uacaususu | | | |
| D-2273 | {GalNAc3K2AhxC6}[invAb]gcuucaUfgCfCfCfUfuc | 1675 | {Phosphate}asUfsguagAfagggCfaUfgaagcsusu | 1676 |
| | uacaususu | | | |
| D-2274 | {GalNAc3K2AhxC6}[invAb]GfcUfuCfaUfgCfcCfUf | 1677 | {Phosphate}asUfsgUfaGfAfagggCfaUfgaagcsusu | 1678 |
| | ucuacaususu | | | |
| D-2275 | {sGalNAc3K2AhxC6}[invAb]ccugcuUfcAfUfGfCfc | 1679 | {Phosphate}usAfsgAfaAfGfgcauGfaAfgcaggsusu | 1680 |
| | uUfuCfuAfsusUf | | | |
| D-2276 | {sGalNAc3K2AhxC6}[invAb]CfcUfgCfuUfcAfuGfC | 1681 | {Phosphate}usAfsgAfaAfGfgcAfuGfaAfgCfaGfgsUf | 1682 |
| | fcuUfuCfuAfsusUf | | su | |
| D-2277 | {sGalNAc3K2AhxC6}UfuCfcUfgCfuUfcAfUfgcCfu | 1683 | {Phosphate}usAfsgAfaAfgGfCfauGfaAfgCfaGfgAfa | 1684 |
| | UfuCfus{invAb} | | sUfsu | |
| D-2278 | {sGalNAc3K2AhxC6}[invAb]CfcUfgCfuUfcAfUfGf | 1685 | {Phosphate}usAfsgAfaAfGfgcauGfaAfgCfaGfgsUfs | 1686 |
| | Cfcuuucuasusu | | u | |
| D-2279 | {sGalNAc3K2AhxC6}UfuCfcUfgCfuUfCfAfUfgccu | 1687 | {Phosphate}usAfsgAfaAfgGfCfaugaAfgCfaGfgAfas | 1688 |
| | uucus{invAb} | | Ufsu | |
| D-2280 | {sGalNAc3K2AhxC6}[invAb]augccuUfuCfUfAfCfa | 1689 | {Phosphate}asGfscCfaCfUfguagAfaAfggcaususu | 1690 |
| | guggcususu | | | |
| D-2281 | {sGalNAc3K2AhxC6}[invAb]augccuUfuCfUfAfCfa | 1691 | {Phosphate}asGfscCfaCfUfguagAfaAfggcaususu | 1692 |
| | gUfgGfcUfsusUf | | | |
| D-2282 | {sGalNAc3K2AhxC6}[invAb]AfuGfcCfuUfuCfuAfC | 1693 | {Phosphate}asGfscCfaCfUfguAfgAfaAfgGfcAfusUf | 1694 |
| | fagUfgGfcUfsusUf | | su | |
| D-2283 | {sGalNAc3K2AhxC6}UfcAfuGfcCfuUfuCfUfacAfg | 1695 | {Phosphate}asGfscCfaCfuGfUfagAfaAfgGfcAfuGfa | 1696 |
| | UfgGfcs{invAb} | | sUfsu | |
| D-2284 | {sGalNAc3K2AhxC6}[invAb]AfuGfcCfuUfuCfUfAf | 1697 | {Phosphate}asGfscCfaCfUfguagAfaAfgGfcAfusUfs | 1698 |
| | Cfaguggcususu | | u | |
| D-2285 | {sGalNAc3K2AhxC6}[invAb]UfcAfuGfcCfuUfUfCf | 1699 | {Phosphate}asGfscCfaCfuGfUfagaaAfgGfcAfuGfas | 1700 |
| | Ufacaguggscsu | | Ufsu | |
| D-2286 | {sGalNAc3K2AhxC6}[invAb]ugcuucAfuGfCfCfUfu | 1701 | {Phosphate}asCfsuGfuAfgAfAfaggcAfuGfaagcasus | 1702 |
| | ucuacasgsu | | u | |
| D-2287 | {sGalNAc3K2AhxC6}[invAb]cuucauGfcCfUfUfUfc | 1703 | {Phosphate}asCfsuGfuAfGfaaagGfcAfugaagsusu | 1704 |
| | uAfcAfgUfsusUf | | | |
| D-2288 | {sGalNAc3K2AhxC6}UfgCfuUfcAfuGfcCfUfuuCfu | 1705 | {Phosphate}asCfsuGfuAfgAfAfagGfcAfuGfaAfgCfa | 1706 |
| | AfcAfgs{invAb} | | sUfsu | |
| D-2289 | {sGalNAc3K2AhxC6}[invAb]CfuUfcAfuGfcCfUfUf | 1707 | {Phosphate}asCfsuGfuAfGfaaagGfcAfuGfaAfgsUf | 1708 |
| | Ufcuacagususu | | su | |
| D-2290 | {sGalNAc3K2AhxC6}UfgCfuUfcAfuGfCfCfUfuucu | 1709 | {Phosphate}asCfsuGfuAfgAfAfaggcAfuGfaAfgCfas | 1710 |
| | acags{invAb} | | Ufsu | |
| D-2291 | {sGalNAc3K2AhxC6}[invAb]UfgCfuUfcAfuGfCfCf | 1711 | {Phosphate}asCfsuGfuAfgAfAfaggcAfuGfaAfgCfas | 1712 |
| | Ufuucuacasgsu | | Ufsu | |
| D-2292 | {sGalNAc3K2AhxC6}[invAb]ugcuucauGfcCfUfUf | 1713 | {Phosphate}asCfsuGfuAfGfaaagGfcAfugaagcasus | 1714 |
| | Ufcuacasgsu | | u | |
| D-2293 | {sGalNAc3K2AhxC6}[invAb]ugcuucauGfcCfUfUf | 1715 | {Phosphate}asCfsuGfuAfGfaaagGfcAfugaagcasus | 1716 |
| | UfcuAfcAfgsUf | | u | |
| D-2294 | {sGalNAc3K2AhxC6}[invAb]UfgCfuUfcAfuGfcCf | 1717 | {Phosphate}asCfsuGfuAfGfaaagGfcAfuGfaAfgCfas | 1718 |
| | UfUfUfcuacasgsu | | Ufsu | |
| D-2295 | {sGalNAc3K2AhxC6}[invAb]guuccuGfcUfUfCfAf | 1719 | {Phosphate}asAfsaGfgCfAfugaaGfcAfggaacsusu | 1720 |
| | ugccuuususu | | | |
| D-2296 | {sGalNAc3K2AhxC6}[invAb]ccugcuUfcAfUfGfCfc | 1721 | {Phosphate}usAfsgAfaAfGfgcauGfaAfgcaggsusu | 1722 |
| | uuucuasusu | | | |
| D-2297 | {sGalNAc3K2AhxC6}[invAb]cuucauGfcCfUfUfUfc | 1723 | {Phosphate}asCfsuGfuAfGfaaagGfcAfugaagsusu | 1724 |
| | uacagususu | | | |
| D-2298 | {sGalNAc3K2AhxC6}[invAb]UfuCfcUfgCfuUfcAfu | 1725 | {Phosphate}usAfsgAfaAfGfgcAfuGfaAfgCfaGfgAfa | 1726 |
| | GfCfcuUfuCfsusAf | | sUfsu | |
| D-2299 | {sGalNAc3K2AhxC6}uuccugCfuUfCfAfUfgccuuuc | 1727 | {Phosphate}usAfsgAfaAfgGfCfaugaAfgCfaggaasus | 1728 |
| | us{invAb} | | u | |
| D-2300 | {sGalNAc3K2AhxC6}[invAb]uuccugCfuUfCfAfUfg | 1729 | {Phosphate}usAfsgAfaAfgGfCfaugaAfgCfaggaasus | 1730 |
| | ccuuucsusa | | u | |
| D-2301 | {sGalNAc3K2AhxC6}uuccugCfuUfCfAfUfgcCfuUf | 1731 | {Phosphate}usAfsgAfaAfgGfCfaugaAfgCfaggaasus | 1732 |
| | uCfus{invAb} | | u | |
| D-2302 | {sGalNAc3K2AhxC6}[invAb]uuccugCfuUfCfAfUfg | 1733 | {Phosphate}usAfsgAfaAfgGfCfaugaAfgCfaggaasus | 1734 |
| | cCfuUfuCfsusAf | | u | |
| D-2303 | {sGalNAc3K2AhxC6}[invAb]UfuCfcUfgCfuUfcAf | 1735 | {Phosphate}usAfsgAfaAfgGfCfauGfaAfgCfaGfgAfa | 1736 |
| | UfgcCfuUfuCfsusAf | | sUfsu | |
| D-2304 | {sGalNAc3K2AhxC6}[invAb]UfuCfcUfgCfuUfCfAf | 1737 | {Phosphate}usAfsgAfaAfgGfCfaugaAfgCfaGfgAfas | 1738 |
| | Ufgccuuucsusa | | Ufsu | |
| D-2305 | {sGalNAc3K2AhxC6}[invAb]uuccugcuUfcAfUfGf | 1739 | {Phosphate}usAfsgAfaAfGfgcauGfaAfgcaggaasus | 1740 |
| | Cfcuuucsusa | | u | |
| D-2306 | {sGalNAc3K2AhxC6}[invAb]uuccugcuUfcAfUfGf | 1741 | {Phosphate}usAfsgAfaAfGfgcauGfaAfgcaggaasus | 1742 |
| | CfcuUfuCfusAf | | u | |
| D-2307 | {sGalNAc3K2AhxC6}[invAb]UfuCfcUfgCfuUfcAf | 1743 | {Phosphate}usAfsgAfaAfGfgcauGfaAfgCfaGfgAfas | 1744 |
| | UfGfCfcuuucsusa | | Ufsu | |
| D-2308 | {sGalNAc3K2AhxC6}[invAb]UfcAfuGfcCfuUfuCfu | 1745 | {Phosphate}asGfscCfaCfUfguAfgAfaAfgGfcAfuGfa | 1746 |
| | AfCfagUfgGfscsUf | | sUfsu | |
| D-2309 | {sGalNAc3K2AhxC6}ucaugcCfuUfUfCfUfacagugg | 1747 | {Phosphate}asGfscCfaCfuGfUfagaaAfgGfcaugasus | 1748 |
| | cs{invAb} | | u | |
| D-2310 | {sGalNAc3K2AhxC6}[invAb]ucaugcCfuUfUfCfUfa | 1749 | {Phosphate}asGfscCfaCfuGfUfagaaAfgGfcaugasus | 1750 |
| | caguggscsu | | u | |
| D-2311 | {sGalNAc3K2AhxC6}ucaugcCfuUfUfCfUfacAfgUf | 1751 | {Phosphate}asGfscCfaCfuGfUfagaaAfgGfcaugasus | 1752 |
| | gGfcs{invAb} | | u | |
| D-2312 | {sGalNAc3K2AhxC6}[invAb]ucaugcCfuUfUfCfUfa | 1753 | {Phosphate}asGfscCfaCfuGfUfagaaAfgGfcaugasus | 1754 |
| | cAfgUfgGfscsUf | | u | |
| D-2313 | {sGalNAc3K2AhxC6}[invAb]UfcAfuGfcCfuUfuCf | 1755 | {Phosphate}asGfscCfaCfuGfUfagAfaAfgGfcAfuGfa | 1756 |
| | UfacAfgUfgGfscsUf | | sUfsu | |
| D-2314 | {sGalNAc3K2AhxC6}UfcAfuGfcCfuUfUfCfUfacag | 1757 | {Phosphate}asGfscCfaCfuGfUfagaaAfgGfcAfuGfas | 1758 |
| | uggcs{invAb} | | Ufsu | |
| D-2315 | {sGalNAc3K2AhxC6}[invAb]ucaugccuUfuCfUfAf | 1759 | {Phosphate}asGfscCfaCfUfguagAfaAfggcaugasusu | 1760 |
| | Cfaguggscsu | | | |
| D-2316 | {sGalNAc3K2AhxC6}[invAb]ucaugccuUfuCfUfAf | 1761 | {Phosphate}asGfscCfaCfUfguagAfaAfggcaugasusu | 1762 |
| | CfagUfgGfcsUf | | | |
| D-2317 | {sGalNAc3K2AhxC6}[invAb]UfcAfuGfcCfuUfuCf | 1763 | {Phosphate}asGfscCfaCfUfguagAfaAfgGfcAfuGfas | 1764 |
| | UfAfCfaguggscsu | | Ufsu | |
| D-2318 | {sGalNAc3K2AhxC6}[invAb]UfgCfuUfcAfuGfcCfu | 1765 | {Phosphate}asCfsuGfuAfGfaaAfgGfcAfuGfaAfgCf | 1766 |
| | UfUfcuAfcAfsgsUf | | asUfsu | |
| D-2319 | {sGalNAc3K2AhxC6}ugcuucAfuGfCfCfUfuucuaca | 1767 | {Phosphate}asCfsuGfuAfgAfAfaggcAfuGfaagcasus | 1768 |
| | gs{invAb} | | u | |
| D-2320 | {sGalNAc3K2AhxC6}ugcuucAfuGfCfCfUfuuCfuAf | 1769 | {Phosphate}asCfsuGfuAfgAfAfaggcAfuGfaagcasus | 1770 |
| | cAfgs{invAb} | | u | |
| D-2321 | {sGalNAc3K2AhxC6}[invAb]ugcuucAfuGfCfCfUfu | 1771 | {Phosphate}asCfsuGfuAfgAfAfaggcAfuGfaagcasus | 1772 |
| | uCfuAfcAfsgsUf | | u | |
| D-2322 | {sGalNAc3K2AhxC6}[invAb]CfuUfcAfuGfcCfuUf | 1773 | {Phosphate}asCfsuGfuAfGfaaAfgGfcAfuGfaAfgsU | 1774 |
| | UfcuAfcAfgUfsusUf | | fsu | |
| D-2323 | {sGalNAc3K2AhxC6}[invAb]UfgCfuUfcAfuGfcCf | 1775 | {Phosphate}asCfsuGfuAfgAfAfagGfcAfuGfaAfgCfa | 1776 |
| | UfuuCfuAfcAfsgsUf | | sUfsu | |
| D-2324 | {sGalNAc3K2AhxC6}[invAb]gcuucaUfgCfCfUfUfu | 1777 | {Phosphate}asUfsgUfaGfAfaaggCfaUfgaagcsusu | 1778 |
| | cuacaususu | | | |
| D-2325 | {sGalNAc3K2AhxC6}[invAb]caugccUfuUfCfUfAfc | 1779 | {Phosphate}asCfscAfcUfGfuagaAfaGfgcaugsusu | 1780 |
| | aguggususu | | | |
| D-2326 | {sGalNAc3K2AhxC6}[invAb]cugcuuCfaUfGfCfCfu | 1781 | {Phosphate}usUfsaGfaAfAfggcaUfgAfagcagsusu | 1782 |
| | uucuaasusu | | | |
| D-2327 | {sGalNAc3K2AhxC6}[invAb]gcuucaUfgCfCfUfUfu | 1783 | {Phosphate}usUfsgUfaGfAfaaggCfaUfgaagcsusu | 1784 |
| | cuacaasusu | | | |
| D-2328 | {sGalNAc3K2AhxC6}[invAb]uucaugCfcUfUfUfCf | 1785 | {Phosphate}usAfscUfgUfAfgaaaGfgCfaugaasusu | 1786 |
| | uacaguasusu | | | |
| D-2329 | {sGalNAc3K2AhxC6}[invAb]guuccuGfcUfUfCfAf | 1787 | {Phosphate}asAfsaGfgCfAfugaaGfcAfggaacsusu | 1788 |
| | ugCfcUfuUfsusUf | | | |
| D-2330 | {sGalNAc3K2AhxC6}auguucCfuGfCfUfUfcaUfgCf | 1789 | {Phosphate}asAfsaGfgCfaUfGfaagcAfgGfaacausus | 1790 |
| | cUfus{invAb} | | u | |
| D-2331 | {sGalNAc3K2AhxC6}[invAb]auguucCfuGfCfUfUf | 1791 | {Phosphate}asAfsaGfgCfaUfGfaagcAfgGfaacausus | 1792 |
| | caUfgCfcUfsusUf | | u | |
| D-2332 | {sGalNAc3K2AhxC6}[invAb]GfuUfcCfuGfcUfuCf | 1793 | {Phosphate}asAfsaGfgCfAfugAfaGfcAfgGfaAfcsUf | 1794 |
| | AfugCfcUfuUfsusUf | | su | |
| D-2333 | {sGalNAc3K2AhxC6}AfuGfuUfcCfuGfcUfUfcaUfg | 1795 | {Phosphate}asAfsaGfgCfaUfGfaaGfcAfgGfaAfcAfu | 1796 |
| | CfcUfus{invAb} | | sUfsu | |
| D-2334 | {sGalNAc3K2AhxC6}[invAb]AfuGfuUfcCfuGfcUf | 1797 | {Phosphate}asAfsaGfgCfaUfGfaaGfcAfgGfaAfcAfu | 1798 |
| | UfcaUfgCfcUfsusUf | | sUfsu | |
| D-2335 | {sGalNAc3K2AhxC6}[invAb]GfuUfcCfuGfcUfUfCf | 1799 | {Phosphate}asAfsaGfgCfAfugaaGfcAfgGfaAfcsUfs | 1800 |
| | Afugccuuususu | | u | |
| D-2336 | {sGalNAc3K2AhxC6}AfuGfuUfcCfuGfCfUfUfcaug | 1801 | {Phosphate}asAfsaGfgCfaUfGfaagcAfgGfaAfcAfus | 1802 |
| | ccuus{invAb} | | Ufsu | |
| D-2337 | {sGalNAc3K2AhxC6}[invAb]AfuGfuUfcCfuGfCfUf | 1803 | {Phosphate}asAfsaGfgCfaUfGfaagcAfgGfaAfcAfus | 1804 |
| | Ufcaugccususu | | Ufsu | |
| D-2338 | {sGalNAc3K2AhxC6}[invAb]auguuccuGfcUfUfCf | 1805 | {Phosphate}asAfsaGfgCfAfugaaGfcAfggaacausus | 1806 |
| | Afugccususu | | u | |
| D-2339 | {sGalNAc3K2AhxC6}[invAb]auguuccuGfcUfUfCf | 1807 | {Phosphate}asAfsaGfgCfAfugaaGfcAfggaacausus | 1808 |
| | AfugCfcUfusUf | | u | |
| D-2340 | {sGalNAc3K2AhxC6}[invAb]GfcUfuCfaUfgCfcUfu | 1809 | {Phosphate}usAfscUfgUfAfgaAfaGfgCfaUfgAfaGfc | 1810 |
| | UfCfuaCfaGfsusAf | | sUfsu | |
| D-2341 | {sGalNAc3K2AhxC6}[invAb]gcuucaUfgCfCfUfUfu | 1811 | {Phosphate}usAfscUfgUfaGfAfaaggCfaUfgaagcsus | 1812 |
| | cuacagsusa | | u | |
| D-2342 | {sGalNAc3K2AhxC6}[invAb]uucaugCfcUfUfUfCf | 1813 | {Phosphate}usAfscUfgUfAfgaaaGfgCfaugaasusu | 1814 |
| | uaCfaGfuAfsusUf | | | |
| D-2343 | {sGalNAc3K2AhxC6}[invAb]gcuucaUfgCfCfUfUfu | 1815 | {Phosphate}usAfscUfgUfaGfAfaaggCfaUfgaagcsus | 1816 |
| | cUfaCfaGfsusAf | | u | |
| D-2344 | {sGalNAc3K2AhxC6}GfcUfuCfaUfgCfCfUfUfucua | 1817 | {Phosphate}usAfscUfgUfaGfAfaaggCfaUfgAfaGfcs | 1818 |
| | cagus{invAb} | | Ufsu | |
| D-2345 | {sGalNAc3K2AhxC6}[invAb]GfcGfgCfuUfcCfUfGf | 1819 | {Phosphate}usAfsgAfaGfCfccagGfaAfgCfcGfcsUfs | 1820 |
| | Gfgcuucuasusu | | u | |
| D-2346 | {sGalNAc3K2AhxC6}[invAb]auggcuUfcCfAfGfAfu | 1821 | {Phosphate}asGfsgCfaUfAfucugGfaAfgccaususu | 1822 |
| | augccususu | | | |
| D-2347 | {sGalNAc3K2AhxC6}[invAb]acauggCfuUfCfCfAfg | 1823 | {Phosphate}asGfsgCfaUfaUfCfuggaAfgCfcaugusus | 1824 |
| | aUfaUfgCfscsUf | | u | |
| D-2348 | {sGalNAc3K2AhxC6}[invAb]AfcAfuGfgCfuUfcCfA | 1825 | {Phosphate}asGfsgCfaUfAfucugGfaAfgCfcAfuGfus | 1826 |
| | fGfAfuaugcscsu | | Ufsu | |
| D-2349 | {sGalNAc3K2AhxC6}[invAb]caacguAfcCfCfUfUfc | 1827 | {Phosphate}asCfsaUfcAfaUfGfaaggGfuAfcguugsu | 1828 |
| | auugausgsu | | su | |
| D-2350 | {sGalNAc3K2AhxC6}[invAb]caacguacCfcUfUfCfA | 1829 | {Phosphate}asCfsaUfcAfAfugaaGfgGfuacguugsus | 1830 |
| | fuuGfaUfgsUf | | u | |
| D-2351 | {sGalNAc3K2AhxC6}[invAb]acguacCfcUfUfCfAfu | 1831 | {Phosphate}asCfsaUfcAfAfugaaGfgGfuacgususu | 1832 |
| | ugaugususu | | | |
| D-2352 | {sGalNAc3K2AhxC6}cugcuucaUfgCfCfUfUfucuac | 1833 | {Phosphate}asUfsgUfaGfAfaaggCfaUfgaagcagsus | 1834 |
| | as{invAb} | | u | |
| D-2353 | {sGalNAc3K2AhxC6}[invAb]cugcuucaUfgCfCfUf | 1835 | {Phosphate}asUfsgUfaGfAfaaggCfaUfgaagcagsus | 1836 |
| | Ufucuacsasu | | u | |
| D-2354 | {sGalNAc3K2AhxC6}[invAb]gcuucaUfgCfCfUfUfu | 1837 | {Phosphate}asUfsgUfaGfAfaaggCfaUfgaagcsusu | 1838 |
| | cUfaCfaUfsusUf | | | |
| D-2355 | {sGalNAc3K2AhxC6}cugcuucaUfgCfCfUfUfucUfa | 1839 | {Phosphate}asUfsgUfaGfAfaaggCfaUfgaagcagsus | 1840 |
| | Cfas{invAb} | | u | |
| D-2356 | {sGalNAc3K2AhxC6}[invAb]cugcuucaUfgCfCfUf | 1841 | {Phosphate}asUfsgUfaGfAfaaggCfaUfgaagcagsus | 1842 |
| | UfucUfaCfasUf | | u | |
| D-2357 | {sGalNAc3K2AhxC6}cugcuucaUfgCfCfUfUfucuac | 1843 | {Phosphate}asUfsguagAfaaggCfaUfgaagcagsusu | 1844 |
| | as{invAb} | | | |
| D-2358 | {sGalNAc3K2AhxC6}[invAb]cugcuucaUfgCfCfUf | 1845 | {Phosphate}asUfsgUfaGfAfaaggCfaUfgaagcagsus | 1846 |
| | Ufucuacas{invAb} | | u | |
| D-2359 | {sGalNAc3K2AhxC6}[invAb]gcuucaUfgCfCfUfUfu | 1847 | {Phosphate}asUfsgUfaGfAfaaGfgCfaUfgaagcsusu | 1848 |
| | cuacaususu | | | |
| D-2360 | {sGalNAc3K2AhxC6}[invAb]CfuUfcAfuGfcCfUfUf | 1849 | {Phosphate}asCfsuGfuAfGfaaagGfcAfugaagsusu | 1850 |
| | Ufcuacagususu | | | |
| D-2361 | {sGalNAc3K2AhxC6}ugcuucauGfcCfUfUfUfcuaca | 1851 | {Phosphate}asCfsuGfuAfGfaaagGfcAfugaagcasus | 1852 |
| | gs{invAb} | | u | |
| D-2362 | {sGalNAc3K2AhxC6}[invAb]cugcuucaUfgCfCfUf | 1853 | {Phosphate}asUfsgUfaGfAfaaGfgCfaUfgaagcagsu | 1854 |
| | Ufucuacsasu | | su | |
| D-2363 | {sGalNAc3K2AhxC6}cugcuucaUfgCfcUfUfucuaca | 1855 | {Phosphate}asUfsgUfaGfAfaaggcaUfgaagcagsusu | 1856 |
| | s{invAb} | | | |
| D-2364 | {sGalNAc3K2AhxC6}cugcuucaUfgCfCfUfUfucuac | 1857 | {Phosphate}asUfsgUfaGfAfaaGfgCfaUfgaagcagsu | 1858 |
| | as{invAb} | | su | |
| D-2365 | {sGalNAc3K2AhxC6}[invAb]cuucauCfcCfUfUfUfc | 1859 | {Phosphate}asCfsuGfuAfGfaaagGfgAfugaagsusu | 1860 |
| | uacagususu | | | |
| D-2366 | {sGalNAc3K2AhxC6}[invAb]gcuucaUfcCfCfUfUfu | 1861 | {Phosphate}asUfsgUfaGfAfaaggGfaUfgaagcsusu | 1862 |
| | cuacaususu | | | |
| D-2367 | {sGalNAc3K2AhxC6}ugcuucauCfcCfUfUfUfcuaca | 1863 | {Phosphate}asCfsuGfuAfGfaaagGfgAfugaagcasus | 1864 |
| | gs{invAb} | | u | |
| D-2368 | {sGalNAc3K2AhxC6}cugcuucaUfcCfCfUfUfucuac | 1865 | {Phosphate}asUfsgUfaGfAfaaggGfaUfgaagcagsus | 1866 |
| | as{invAb} | | u | |
| D-2369 | {sGalNAc3K2AhxC6}[invAb]acauugCfuCfUfUfUfc | 1867 | {Phosphate}usCfsaGfgUfGfaaagAfgCfaaugususu | 1868 |
| | accugasusu | | | |
| D-2370 | {sGalNAc3K2AhxC6}cugcuucaUfgCfCfUfUfucuac | 1869 | asUfsgUfaGfAfaaggCfaUfgaagcagsusu | 1870 |
| | as{invAb} | | | |
| D-2371 | {sGalNAc3K2AhxC6}cugcuucaUfgCfCfUfUfucuac | 1871 | asUfsgUfaGfAfaaggCfaUfgaagcasgsusu | 1872 |
| | as{invAb} | | | |
| D-2372 | {sGalNAc3K2AhxC6}cugcuucaUfgCfCfUfUfucuac | 1873 | asUfsgsUfaGfAfaaggCfaUfgaagcagsusu | 1874 |
| | as{invAb} | | | |
| D-2373 | {sGalNAc3K2AhxC6}cugcuucaUfgCfCfUfUfucuac | 1875 | asUfsgUfaGfAfaaggCfaUfgaagcagusu | 1876 |
| | as{invAb} | | | |
| D-2374 | {sGalNAc3K2AhxC6}cugcuucaUfgCfCfUfUfucuac | 1877 | asUfsgsUfaGfAfaaggCfaUfgaagcagusu | 1878 |
| | as{invAb} | | | |
| D-2375 | {sGalNAc3K2AhxC6}cugcuucaUfgCfCfUfUfucuac | 1879 | asUfgUfaGfAfaaggCfaUfgaagcagsusu | 1880 |
| | as{invAb} | | | |
| D-2376 | {sGalNAc3K2AhxC6}cugcuucaUfgCfCfUfUfucuac | 1881 | asUfgUfaGfAfaaggCfaUfgaagcasgsusu | 1882 |
| | as{invAb} | | | |
| D-2377 | {sGalNAc3K2AhxC6}cugcuucaUfgCfCfUfUfucuac | 1883 | asUfsgUfaGfAfaaggCfaUfgaagcagsusu | 1884 |
| | sas{invAb} | | | |
| D-2378 | {sGalNAc3K2AhxC6}cugcuucaUfgCfCfUfUfucuas | 1885 | asUfsgUfaGfAfaaggCfaUfgaagcagsusu | 1886 |
| | csas{invAb} | | | |
| D-2379 | {sGalNAc3K2AhxC6}csugcuucaUfgCfCfUfUfucua | 1887 | asUfsgUfaGfAfaaggCfaUfgaagcagsusu | 1888 |
| | cas{invAb} | | | |
| D-2380 | {sGalNAc3K2AhxC6}csusgcuucaUfgCfCfUfUfucu | 1889 | asUfsgUfaGfAfaaggCfaUfgaagcagsusu | 1890 |
| | acas{invAb} | | | |
| D-2381 | {sGalNAc3K2AhxC6}[invAb]cuucauGfcCf[dT]UfU | 1891 | {Phosphate}asCfsuGfuAfGfaaagGfcAfugaagsusu | 1892 |
| | fcuacagususu | | | |
| D-2382 | {sGalNAc3K2AhxC6}[invAb]cuucauGfcCfUfUfUfc | 1893 | {Phosphate}asCfsuGfuAfGfaaAfgGfcAfugaagsusu | 1894 |
| | uacagususu | | | |
| D-2383 | {sGalNAc3K2AhxC6}[invAb]cuucauGfcCfuUfUfc | 1895 | {Phosphate}asCfsuGfuAfGfaaagGfcAfugaagsusu | 1896 |
| | uacagususu | | | |
| D-2384 | {sGalNAc3K2AhxC6}[invAb]cuucauGfcCfUfUfUfc | 1897 | {Phosphate}asCfsuGfuaGfaaagGfcAfugaagsusu | 1898 |
| | uacagususu | | | |
| D-2385 | {sGalNAc3K2AhxC6}[invAb]cuucauGfcCfUfUfUfc | 1899 | {Phosphate}asCfsuguaGfaaagGfcAfugaagsusu | 1900 |
| | uacagususu | | | |
| D-2386 | {sGalNAc3K2AhxC6}[invAb]cuucauGfc[dqUfUf | 1901 | {Phosphate}asCfsuGfuAfGfaaagGfcAfugaagsusu | 1902 |
| | Ufcuacagususu | | | |
| D-2387 | {sGalNAc3K2AhxC6}[invAb]cuucauGfcCfUf[dT]U | 1903 | {Phosphate}asCfsuGfuAfGfaaagGfcAfugaagsusu | 1904 |
| | fcuacagususu | | | |
| D-2388 | {sGalNAc3K2AhxC6}[invAb]gcuucaUfgGfGfAfUf | 1905 | {Phosphate}asUfsgUfaGfAfauccCfaUfgaagcsusu | 1906 |
| | ucuacaususu | | | |
| D-2389 | {sGalNAc3K2AhxC6}[invAb]cuucauGfcGfAfAfUfc | 1907 | {Phosphate}asCfsuGfuAfGfauucGfcAfugaagsusu | 1908 |
| | uacagususu | | | |
| D-2390 | {sGalNAc3K2AhxC6}cugcuucaUfgCfCfUfUfucuac | 1909 | {Phosphate}usUfsgUfaGfAfaaggCfaUfgaagcagsus | 1910 |
| | as{invAb} | | u | |
| D-2391 | {sGalNAc3K2AhxC6}[invAb]cugcuucaUfgCfCfUf | 1911 | {Phosphate}usUfsgUfaGfAfaaggCfaUfgaagcagsus | 1912 |
| | Ufucuacsasa | | u | |
| D-2392 | {sGalNAc3K2AhxC6}cugcuucaUfgCfCfUfUfucuac | 1913 | {Phosphate}usUfsgUfaGfAfaaggCfaUfgaagcagsus | 1914 |
| | as{invDA} | | u | |
| D-2393 | {sGalNAc3K2AhxC6}cugcuucaUfgGfGfAfUfucuac | 1915 | {Phosphate}asUfsgUfaGfAfauccCfaUfgaagcagsus | 1916 |
| | as{invAb} | | u | |
| D-2394 | {sGalNAc3K2AhxC6}[invAb]cugcuucaUfgGfGfAf | 1917 | {Phosphate}asUfsgUfaGfAfauccCfaUfgaagcagsus | 1918 |
| | Ufucuacsasu | | u | |
| D-2395 | {sGalNAc3K2AhxC6}[invAb]CfuUfcAfuGfcCfUfUf | 1919 | {Phosphate}asCfsuGfuAfGfaaagGfcAfugaagsusu | 1920 |
| | UfcuAfcAfgUfsusUf | | | |
| D-2396 | {sGalNAc3K2AhxC6}[invAb]cuucauGfcCfUfUfUfc | 1921 | {Phosphate}asCfsuGfuAfGfaaagGfcAfuGfaAfgsUf | 1922 |
| | uAfcAfgUfsusUf | | su | |
| D-2397 | {sGalNAc3K2AhxC6}[invAb]gcuucaUfgCfCfUfUfu | 1923 | asUfsgUfaGfAfaaggCfaUfgaagcsusu | 1924 |
| | cuacaususu | | | |
| D-2398 | {sGalNAc3K2AhxC6}[invAb]ugcuucauGfcCfUfUf | 1925 | asCfsuGfuAfGfaaagGfcAfugaagcasusu | 1926 |
| | Ufcuacags{invAb} | | | |
| D-2399 | {sGalNAc3K2AhxC6}[invAb]cuucauGfcCfUfUfUfc | 1927 | {Phosphate}asCfsuGfuAfGfaaagGfcAfuGfaAfgsUf | 1928 |
| | uacagususu | | su | |
| D-2400 | {sGalNAc3K2AhxC6}ugcuucauGfcCfUfUfUfcuAfc | 1929 | asCfsuGfuAfGfaaagGfcAfugaagcasusu | 1930 |
| | Afgs{invAb} | | | |
| D-2401 | {sGalNAc3K2AhxC6}ugcuucauGfcCfUfUfUfcuaca | 1931 | asCfsuGfuAfGfaaAfgGfcAfugaagcasusu | 1932 |
| | gs{invAb} | | | |
| D-2402 | {sGalNAc3K2AhxC6}ugcuucauGfcCfUfUfUfcuaca | 1933 | asCfsuguaGfaaagGfcAfugaagcasusu | 1934 |
| | gs{invAb} | | | |
| D-2403 | {sGalNAc3K2AhxC6}[invAb]cuucauGfcCfUfUfUfc | 1935 | asCfsuGfuAfGfaaagGfcAfugaagsusu | 1936 |
| | uacagususu | | | |
| D-2404 | {sGalNAc3K2AhxC6}ugcuucauGfcCfUfUfUfcuaca | 1937 | asCfsuGfuAfGfaaagGfcAfugaagcasusu | 1938 |
| | gs{invAb} | | | |
| D-2405 | {GalNAc3K2AhxC6}augccuuuCfuAfCfAfGfuggcus | 1939 | {Phosphate}asGfscCfaCfUfguAfgAfaAfgGfcAfuGfa | 1940 |
| | us{invAb} | | sUfsu | |
| D-2406 | {sGalNAc3K2AhxC6}ucaugccuUfuCfUfAfCfagugg | 1941 | asGfscCfaCfUfguagAfaAfggcaugasusu | 1942 |
| | cs{invAb} | | | |
| D-2407 | {sGalNAc3K2AhxC6}[invAb]augccuUfuCfUfAfCfa | 1943 | asGfscCfaCfUfguagAfaAfggcaususu | 1944 |
| | guggcususu | | | |
| D-2408 | {sGalNAc3K2AhxC6}[invAb]augccuUfuCfUfAfCfa | 1945 | asGfscCfaCfUfguagAfaAfggcaususu | 1946 |
| | gUfgGfcUfsusUf | | | |
| D-2409 | {sGalNAc3K2AhxC6}[invAb]ucaugccuUfuCfUfAf | 1947 | asGfscCfaCfUfguagAfaAfggcaugasusu | 1948 |
| | Cfaguggscsu | | | |
| D-2410 | {sGalNAc3K2AhxC6}ucaugccuUfuCfUfAfCfagUfg | 1949 | asGfscCfaCfUfguagAfaAfggcaugasusu | 1950 |
| | Gfcs{invAb} | | | |
| D-2411 | {sGalNAc3K2AhxC6}[invAb]augccuUfuCfUfAfCfa | 1951 | asGfscCfaCfUfguAfgAfaAfggcaususu | 1952 |
| | guggcususu | | | |
| D-2412 | {sGalNAc3K2AhxC6}ucaugccuUfuCfUfAfCfagugg | 1953 | asGfscCfaCfUfguAfgAfaAfggcaugasusu | 1954 |
| | cs{invAb} | | | |
| D-2413 | {sGalNAc3K2AhxC6}ucaugccuUfuCfUfAfCfagugg | 1955 | asGfsccacUfguagAfaAfggcaugasusu | 1956 |
| | cs{invAb} | | | |
| D-2414 | {sGalNAc3K2AhxC6}[invAb]ucaugccuUfuCfUfAf | 1957 | asGfscCfaCfUfguagAfaAfggcaugasusu | 1958 |
| | Cfaguggcs{invAb} | | | |
| D-2415 | {sGalNAc3K2AhxC6}[invAb]augccuUfuCfUfAfCfa | 1959 | usGfscCfaCfUfguagAfaAfggcaususu | 1960 |
| | guggcasusu | | | |
| D-2416 | {sGalNAc3K2AhxC6}ucaugccuUfuCfUfAfCfagugg | 1961 | usGfscCfaCfUfguagAfaAfggcaugasusu | 1962 |
| | cs{invAb} | | | |
| D-2417 | {sGalNAc3K2AhxC6}[invAb]ucaugccuUfuCfUfAf | 1963 | usGfscCfaCfUfguagAfaAfggcaugasusu | 1964 |
| | Cfaguggscsa | | | |
| D-2418 | {sGalNAc3K2AhxC6}ucaugccuUfuCfUfAfCfagugg | 1965 | usGfscCfaCfUfguagAfaAfggcaugasusu | 1966 |
| | cs{invDA} | | | |
| D-2419 | {sGalNAc3K2AhxC6}cugcuucaUfgCfCfUfUfucuac | 1967 | asUfsguagAfaaggCfaUfgaagcagsusu | 1968 |
| | as{invAb} | | | |
| D-2420 | {sGalNAc3K2AhxC6}cugcuucaUfgCfCfUfUfucuac | 1969 | usUfsguagAfaaggCfaUfgaagcagsusu | 1970 |
| | as{invAb} | | | |
| D-2421 | {sGalNAc3K2AhxC6}cugcuucaUfgCfCfUfUfucuac | 1971 | usUfsguagAfaaggCfaUfgaagcagsusu | 1972 |
| | as{invDA} | | | |
| D-2422 | {sGalNAc3K2AhxC6}ucaugccuUfuCfUfAfCfagugg | 1973 | usGfsccacUfguagAfaAfggcaugasusu | 1974 |
| | cs{invAb} | | | |
| D-2423 | {sGalNAc3K2AhxC6}ucaugccuUfuCfUfAfCfagugg | 1975 | usGfsccacUfguagAfaAfggcaugasusu | 1976 |
| | cs{invDA} | | | |
| D-2424 | {sGalNAc3K2AhxC6}[invAb]cuucauGfcCfuUfUfc | 1977 | {Phosphate}asCfsuGfuAfGfaaAfgGfcAfugaagsusu | 1978 |
| | uacagususu | | | |
| D-2425 | {sGalNAc3K2AhxC6}cugcuucaUfgCfCfUfUfucuac | 1979 | asUfsgUfa[ANAfaaggCfaUfgaagcagsusu | 1980 |
| | as{invAb} | | | |
| D-2426 | {sGalNAc3K2AhxC6}cugcuucaUfgCfCfUfUfucuac | 1981 | asUfsgua[Ab]AfaaggCfaUfgaagcagsusu | 1982 |
| | as{invAb} | | | |
| D-2427 | {sGalNAc3K2AhxC6}ugcuucauGfcCfUfUfUfcuaca | 1983 | asCfsuGfu[Ab]GfaaagGfcAfugaagcasusu | 1984 |
| | gs{invAb} | | | |
| D-2428 | {sGalNAc3K2AhxC6}ugcuucauGfcCfUfUfUfcuaca | 1985 | asCfsugu[Ab]GfaaagGfcAfugaagcasusu | 1986 |
| | gs{invAb} | | | |
| D-2429 | {sGalNAc3K2AhxC6}ucaugccuUfuCfUfAfCfagugg | 1987 | asGfscCfa[Ab]UfguagAfaAfggcaugasusu | 1988 |
| | cs{invAb} | | | |
| D-2430 | {sGalNAc3K2AhxC6}ucaugccuUfuCfUfAfCfagugg | 1989 | asGfscca[Ab]UfguagAfaAfggcaugasusu | 1990 |
| | cs{invAb} | | | |
| D-2431 | {sGalNAc3K2AhxC6}cugcuucaUfgCfCfUfUfucuac | 1991 | asUfs[GNA-G]uagAfaaggCfaUfgaagcagsusu | 1992 |
| | as{invAb} | | | |
| D-2432 | {sGalNAc3K2AhxC6}cugcuucaUfgCfCfUfUfucuac | 1993 | asUfsg[GNA-U]agAfaaggCfaUfgaagcagsusu | 1994 |
| | as{invAb} | | | |
| D-2433 | {sGalNAc3K2AhxC6}cugcuucaUfgCfCfUfUfucuac | 1995 | asUfsgu[GNA-A]gAfaaggCfaUfgaagcagsusu | 1996 |
| | as{invAb} | | | |
| D-2434 | {sGalNAc3K2AhxC6}cugcuucaUfgCfCfUfUfucuac | 1997 | asUfsgua[GNA-G]AfaaggCfaUfgaagcagsusu | 1998 |
| | as{invAb} | | | |
| D-2435 | {sGalNAc3K2AhxC6}cugcuucaUfgCfCfUfUfucuac | 1999 | asUfsguag[GNA-A]aaggCfaUfgaagcagsusu | 2000 |
| | as{invAb} | | | |
| D-2436 | {sGalNAc3K2AhxC6}cugcuucaUfgCfCfUfUfucuac | 2001 | asUfsguagAf[GNA-A]aggCfaUfgaagcagsusu | 2002 |
| | as{invAb} | | | |
| D-2437 | {sGalNAc3K2AhxC6}cugcuucaUfgCfCfUfUfucuac | 2003 | asUfsgUfagAfaaggCfaUfgaagcagsusu | 2004 |
| | as{invAb} | | | |
| D-2438 | {sGalNAc3K2AhxC6}[invAb]cugcuucaUfgCfCfUf | 2005 | asUfsguagAfaaggCfaUfgaagcagsusu | 2006 |
| | Ufucuacsasu | | | |
| D-2439 | {sGalNAc3K2AhxC6}[invAb]cugcuucaUfgCfCfUf | 2007 | asUfsguagAfaaggCfaUfgaagcagsusu | 2008 |
| | Ufucuacas{invAb} | | | |
| D-2440 | {sGalNAc3K2AhxC6}cugcuucaUfgCfCfUfUfucuac | 2009 | asUfsguagAfaaGfgCfaUfgaagcagsusu | 2010 |
| | as{invAb} | | | |
| D-2441 | {sGalNAc3K2AhxC6}cugcuucaUfgCfCfUfUfucUfa | 2011 | asUfsguagAfaaggCfaUfgaagcagsusu | 2012 |
| | Cfas{invAb} | | | |
| D-2442 | {sGalNAc3K2AhxC6}[invAb]cugcuucaUfgCfCfUf | 2013 | asUfsguagAfaaggCfaUfgaagcagsusu | 2014 |
| | UfucUfaCfasUf | | | |
| D-2443 | {sGalNAc3K2AhxC6}cugcuucaUfgCfCfUfUfucUfa | 2015 | asUfsguagAfaaGfgCfaUfgaagcagsusu | 2016 |
| | Cfas{invAb} | | | |
| D-2444 | {sGalNAc3K2AhxC6}cugcuucaUfgCfCfUfUfucuac | 2017 | asUfsgUfaGfAfaaGfgCfaUfgaagcagsusu | 2018 |
| | as{invAb} | | | |
| D-2445 | {sGalNAc3K2AhxC6}[invAb]cugcuucaUfgCfCfUf | 2019 | asUfsgUfaGfAfaaGfgCfaUfgaagcagsusu | 2020 |
| | Ufucuacsasu | | | |
| D-2446 | {sGalNAc3K2AhxC6}[invAb]cugcuucaUfgCfCfUf | 2021 | asUfsgUfaGfAfaaggCfaUfgaagcagsusu | 2022 |
| | Ufucuacas{invAb} | | | |
| D-2447 | {sGalNAc3K2AhxC6}cugcuucaUfgCfCfUfUfucuac | 2023 | as[Ab]guagAfaaggCfaUfgaagcagsusu | 2024 |
| | as{invAb} | | | |
| D-2448 | {sGalNAc3K2AhxC6}cugcuucaUfgCfCfUfUfucuac | 2025 | asUfs[Ab]uagAfaaggCfaUfgaagcagsusu | 2026 |
| | as{invAb} | | | |
| D-2449 | {sGalNAc3K2AhxC6}cugcuucaUfgCfCfUfUfucuac | 2027 | asUfsg[Ab]agAfaaggCfaUfgaagcagsusu | 2028 |
| | as{invAb} | | | |
| D-2450 | {sGalNAc3K2AhxC6}cugcuucaUfgCfCfUfUfucuac | 2029 | asUfsgu[Ab]gAfaaggCfaUfgaagcagsusu | 2030 |
| | as{invAb} | | | |
| D-2451 | {sGalNAc3K2AhxC6}cugcuucaUfgCfCfUfUfucuac | 2031 | asUfsguag[Ab]aaggCfaUfgaagcagsusu | 2032 |
| | as{invAb} | | | |
| D-2452 | {sGalNAc3K2AhxC6}cugcuucaUfgCfCfUfUfucuac | 2033 | asUfsguagAf[Ab]aggCfaUfgaagcagsusu | 2034 |
| | as{invAb} | | | |
| D-2453 | {sGalNAc3K2AhxC6}caacguacCfcUfUfCfAfuugau | 2035 | asCfsaucaAfugaaGfgGfuacguugsusu | 2036 |
| | gs{invAb} | | | |
| D-2454 | {sGalNAc3K2AhxC6}caacguacCfcUfUfCfAfuugau | 2037 | asCfsaUfcAfAfugaaGfgGfuacguugsusu | 2038 |
| | gs{invAb} | | | |
| D-2455 | {sGalNAc3K2AhxC6}acauggcuUfcCfAfGfAfuaugc | 2039 | asGfsgcauAfucugGfaAfgccaugususu | 2040 |
| | cs{invAb} | | | |
| D-2456 | {sGalNAc3K2AhxC6}acauggcuUfcCfAfGfAfuaugc | 2041 | asGfsgCfaUfAfucugGfaAfgccaugususu | 2042 |
| | cs{invAb} | | | |
| D-2457 | {sGalNAc3K2AhxC6}cugcuucaUfgCfCfUfUfucuac | 2043 | asUfsguaGfAfaaggCfaUfgaagcagsusu | 2044 |
| | as{invAb} | | | |
| D-2458 | {sGalNAc3K2AhxC6}cugcuucaUfgCfCfUfUfucUfa | 2045 | asUfsguagAfaaggCfaUfgaagcagsusu | 2046 |
| | cas{invAb} | | | |
| D-2459 | {sGalNAc3K2AhxC6}cugcuucaUfgCfCfUfUfucuaC | 2047 | asUfsguagAfaaggCfaUfgaagcagsusu | 2048 |
| | fas{invAb} | | | |
| D-2460 | {sGalNAc3K2AhxC6}cugcggcuUfcCfUfGfGfgcuuc | 2049 | usAfsgAfaGfCfccagGfaAfgccgcagsusu | 2050 |
| | us{invAb} | | | |
| D-2461 | {sGalNAc3K2AhxC6}cugcggcuUfcCfUfGfGfgcuuc | 2051 | usAfsgaagCfccagGfaAfgccgcagsusu | 2052 |
| | us{invAb} | | | |
| D-2462 | {sGalNAc3K2AhxC6}ugcuucauGfcCfUfUfUfcuaca | 2053 | asCfsuGfuaGfaaagGfcAfugaagcasusu | 2054 |
| | gs{invAb} | | | |
| D-2463 | {sGalNAc3K2AhxC6}[invAb]ugcuucauGfcCfUfUf | 2055 | asCfsuGfuaGfaaagGfcAfugaagcasusu | 2056 |
| | Ufcuacasgsu | | | |
| D-2464 | {sGalNAc3K2AhxC6}[invAb]ugcuucauGfcCfUfUf | 2057 | asCfsuGfuaGfaaagGfcAfugaagcasusu | 2058 |
| | Ufcuacags{invAb} | | | |
| D-2465 | {sGalNAc3K2AhxC6}ugcuucauGfcCfUfUfUfcuaca | 2059 | asCfsuGfuaGfaaAfgGfcAfugaagcasusu | 2060 |
| | gs{invAb} | | | |
| D-2466 | {sGalNAc3K2AhxC6}ugcuucauGfcCfUfUfUfcuAfc | 2061 | asCfsuGfuaGfaaagGfcAfugaagcasusu | 2062 |
| | Afgs{invAb} | | | |
| D-2467 | {sGalNAc3K2AhxC6}ugcuucauGfcCfUfUfUfcuAfc | 2063 | asCfsuGfuAfGfaaagGfcAfuGfaAfgCfasUfsu | 2064 |
| | Afgs{invAb} | | | |
| D-2468 | {sGalNAc3K2AhxC6}cugcuuCfaUfGfCfcuuucuacs | 2065 | asUfsguaGfaaAfggcaUfgAfagcagsusu | 2066 |
| | asu | | | |
| D-2469 | {sGalNAc3K2AhxC6}cugcuuCfaUfGfCfcuuucuacs | 2067 | asUfsguaGfaaaggcaUfgAfagcagsusu | 2068 |
| | asu | | | |
| D-2470 | {sGalNAc3K2AhxC6}cugcuuCfaUfGfCfcuuucuacs | 2069 | asUfsguaGfaAfAfggcaUfgAfagcagsusu | 2070 |
| | asu | | | |
| D-2471 | {sGalNAc3K2AhxC6}ugcuucauGfcCfUfUfUfcuaca | 2071 | usCfsuguaGfaaagGfcAfugaagcasusu | 2072 |
| | gs{invAb} | | | |
| D-2472 | {sGalNAc3K2AhxC6}ugcuucauGfcCfUfUfUfcuaca | 2073 | usCfsuguaGfaaagGfcAfugaagcasusu | 2074 |
| | gs{invDA} | | | |
| D-2473 | {sGalNAc3K2AhxC6}cugcuucaUfgCfCfUfUfucuac | 2075 | asUfsguagAfaaggCfaUfgaagcagsusu | 2076 |
| | as{invDTI | | | |
| D-2474 | {sGalNAc3K2AhxC6}cugcuucaUfgCfCfUfUfucuac | 2077 | asUfsguagAf[sGNA-A]aggCfaUfgaagcagsusu | 2078 |
| | as{invAb} | | | |
| D-2475 | {sGalNAc3K2AhxC6}cugcuucaUfgCfCfUfUfucuac | 2079 | asUfsguagAfs[GNA-A]aggCfaUfgaagcagsusu | 2080 |
| | as{invAb} | | | |
| D-2476 | {sGalNAc3K2AhxC6}cugcuucaUfgCfCfUfUfucuac | 2081 | asUfsguagAfs[sGNA-A]aggCfaUfgaagcagsusu | 2082 |
| | as{invAb} | | | |
| D-2477 | csusgcuucaUfgCfCfUfUfucuacas{invAb} | 2083 | asUfsguagAf[GNA-A]aggCfaUfgaagcagsusu | 2084 |
| D-2478 | csusgcuucaUfgCfCfUfUfucuacas{invAb} | 2085 | asUfsguagAf[GNA-A]AfggCfaUfgaagcagsusu | 2086 |
| D-2479 | csusgcuucaUfgCfCfUfUfucuacas{invAb} | 2087 | asUfsguaga[GNA-A]aggCfaUfgaagcagsusu | 2088 |
| D-2480 | csusgcuucaUfgCfCfUfuucuacas{invAb} | 2089 | asUfsguagAf[GNA-A]aggCfaUfgaagcagsusu | 2090 |
| D-2481 | csusgcuucaUfgCfCfUfuucuacas{invAb} | 2091 | asUfsguaga[GNA-A]aggCfaUfgaagcagsusu | 2092 |
| D-2482 | csusgcuucaUfgCfCfUfUfucuacas{invAb} | 2093 | asUfsguaga[GNA-A]AfggCfaUfgaagcagsusu | 2094 |
| D-2483 | csusgcuucaUfgCfCfUfuucuacas{invAb} | 2095 | asUfsguagAf[GNA-A]AfggCfaUfgaagcagsusu | 2096 |
| D-2484 | csusgcuucaUfgCfCfUfuucuacas{invAb} | 2097 | asUfsguaga[GNA-A]AfggCfaUfgaagcagsusu | 2098 |
| D-2485 | csusgcuucaUfgCfCfUfUfucuacas{invAb} | 2099 | asUfsgUfaGfAf[GNA-A]aggCfaUfgaagcagsusu | 2100 |
| D-2486 | csusgcuucaUfgCfCfUfUfucuacas{invAb} | 2101 | asUfsgUfagAf[GNA-A]aGfgCfaUfgaagcagsusu | 2102 |
| D-2487 | csusgcuucaUfgCfCfUfUfucuacas{invAb} | 2103 | asUfsgUfagAf[GNA-A]aggCfaUfgaagcagsusu | 2104 |
| D-2488 | csusgcuucaUfgCfCfUfUfucuacas{invAb} | 2105 | asUfsgUfaGfAf[GNA-A]aGfgCfaUfgaagcagsusu | 2106 |
| D-2489 | csusgcuucaUfgCfCfUfUfucuacas{invAb} | 2107 | asUfsguagAf[GNA-A]aGfgCfaUfgaagcagsusu | 2108 |
| D-2490 | csusgcuucaUfgCfCfUfUfucUfaCfas{invAb} | 2109 | asUfsguagAf[GNA-A]aGfgCfaUfgaagcagsusu | 2110 |
| D-2491 | csusgcuucaUfgCfCfUfUfucuacas{invAb} | 2111 | asUfsguagAf[GNA-A]a[dG]gCfaUfgaagcagsusu | 2112 |
| D-2492 | csusgcuucaUfgCfCfUfUfucuacas{invAb} | 2113 | asUfsguagAf[GNA-A][dA]ggCfaUfgaagcagsusu | 2114 |
| D-2493 | csusgcuucaUfgCfCfUfUfucuacas{invAb} | 2115 | asUfsguagAf[GNA-A]ag[dG]CfaUfgaagcagsusu | 2116 |
| D-2494 | csusgcuucaUfgCfCfUfUfucuacas{invAb} | 2117 | asUfsguaGfAf[GNA-A]aggCfaUfgaagcagsusu | 2118 |
| D-2495 | csusgcuucaUfgCfCfUfUfucuacas{invAb} | 2119 | asUfsguaGfa[GNA-A]aggCfaUfgaagcagsusu | 2120 |
| D-2496 | csusgcuucaUfgCfCfUfUfucuacas{invAb} | 2121 | asUfsguaGfa[GNA-A]AfggCfaUfgaagcagsusu | 2122 |
| D-2497 | csusgcuuCfaUfGfCfcuuucuacas{invAb} | 2123 | asUfsguaGfa[GNA-A]aggcaUfgAfagcagsusu | 2124 |
| D-2498 | csusgcuuCfaUfGfCfcuuucuacas{invAb} | 2125 | asUfsguaGfa[GNA-A]AfggcaUfgAfagcagsusu | 2126 |
| D-2499 | csusgcuuCfaUfgCfcuuucuacas{invAb} | 2127 | asUfsguaga[GNA-A]aggCfaUfgAfagcagsusu | 2128 |
| D-2500 | csusgcuuCfaUfgCfcuuucuacas{invAb} | 2129 | asUfsguagaaaggCfaUfgAfagcagsusu | 2130 |
| D-2501 | usgscuucauGfcCfUfUfUfcuacags{invDA} | 2131 | us[sGNA-C]uguaGfaaagGfcAfugaagcasusu | 2132 |
| D-2502 | usgscuucauGfcCfUfUfUfcuacags{invDA} | 2133 | usCfs[GNA-U]guaGfaaagGfcAfugaagcasusu | 2134 |
| D-2503 | usgscuucauGfcCfUfUfUfcuacags{invDA} | 2135 | usCfsug[GNA-U]aGfaaagGfcAfugaagcasusu | 2136 |
| D-2504 | usgscuucauGfcCfUfUfUfcuacags{invDA} | 2137 | usCfsugu[GNA-A]GfaaagGfcAfugaagcasusu | 2138 |
| D-2505 | usgscuucauGfcCfUfUfUfcuacags{invDA} | 2139 | usCfsuguaGf[GNA-A]aagGfcAfugaagcasusu | 2140 |
| D-2506 | usgscuucauGfcCfUfUfUfcuacags{invDA} | 2141 | us[Ab]uguaGfaaagGfcAfugaagcasusu | 2142 |
| D-2507 | usgscuucauGfcCfUfUfUfcuacags{invDA} | 2143 | usCfs[Ab]guaGfaaagGfcAfugaagcasusu | 2144 |
| D-2508 | usgscuucauGfcCfUfUfUfcuacags{invDA} | 2145 | usCfsu[Ab]uaGfaaagGfcAfugaagcasusu | 2146 |
| D-2509 | usgscuucauGfcCfUfUfUfcuacags{invDA} | 2147 | usCfsug[ANaGfaaagGfcAfugaagcasusu | 2148 |
| D-2510 | usgscuucauGfcCfUfUfUfcuacags{invDA} | 2149 | usCfsugu[ANGfaaagGfcAfugaagcasusu | 2150 |
| D-2511 | usgscuucauGfcCfUfUfUfcuacags{invDA} | 2151 | usCfsugua[Ab]aaagGfcAfugaagcasusu | 2152 |
| D-2512 | usgscuucauGfcCfUfUfUfcuacags{invDA} | 2153 | usCfsuguaGf[Ab]aagGfcAfugaagcasusu | 2154 |
| D-2513 | uscsaugccuUfuCfUfAfCfaguggcs{invDA} | 2155 | asGfsccacUfguagAfaAfggcaugasusu | 2156 |
| D-2514 | uscsaugccuUfuCfUfAfCfaguggcs{invAb} | 2157 | usGfsccacUfguagAfaAfggcaugasusu | 2158 |
| D-2515 | uscsaugccuUfuCfUfAfCfaguggcs{invDA} | 2159 | usGfsccacUfguagAfaAfggcaugasusu | 2160 |
| D-2516 | uscscugcuuCfaUfGfCfCfuuucuas{invDA} | 2161 | asUfsagaaAfggcaUfgAfagcaggasusu | 2162 |
| D-2517 | uscscugcuuCfaUfGfCfCfuuucuas{invAb} | 2163 | usUfsagaaAfggcaUfgAfagcaggasusu | 2164 |
| D-2518 | uscscugcuuCfaUfGfCfCfuuucuas{invDA} | 2165 | usUfsagaaAfggcaUfgAfagcaggasusu | 2166 |
| D-2519 | usasuguuccUfgCfUfUfCfaugccus{invDA} | 2167 | asAfsggcaUfgaagCfaGfgaacauasusu | 2168 |
| D-2520 | usasuguuccUfgCfUfUfCfaugccus{invAb} | 2169 | usAfsggcaUfgaagCfaGfgaacauasusu | 2170 |
| D-2521 | usasuguuccUfgCfUfUfCfaugccus{invDA} | 2171 | usAfsggcaUfgaagCfaGfgaacauasusu | 2172 |
| D-2522 | {sGalNAc3K2AhxC6}uccugcuuCfaUfGfCfCfuuucu | 2173 | asUfsagaaAfggcaUfgAfagcaggasusu | 2174 |
| | as{invAb} | | | |
| D-2523 | {sGalNAc3K2AhxC6}uauguuccUfgCfUfUfCfaugcc | 2175 | asAfsggcaUfgaagCfaGfgaacauasusu | 2176 |
| | us{invAb} | | | |
| D-2524 | {sGalNAc3K2AhxC6}ucaugccuUfuCfUfAfCfagugg | 2177 | asGfsccacUfguagAfaAfggcaugasusu | 2178 |
| | cs{invDT} | | | |
| D-2525 | {sGalNAc3K2AhxC6}uccugcuuCfaUfGfCfCfuuucu | 2179 | asUfsagaaAfggcaUfgAfagcaggasusu | 2180 |
| | as{invDT} | | | |
| D-2526 | {sGalNAc3K2AhxC6}uccugcuuCfaUfGfCfCfuuucu | 2181 | usUfsagaaAfggcaUfgAfagcaggasusu | 2182 |
| | as{invDA} | | | |
| D-2527 | {sGalNAc3K2AhxC6}uauguuccUfgCfUfUfCfaugcc | 2183 | usAfsggcaUfgaagCfaGfgaacauasusu | 2184 |
| | us{invDA} | | | |
| D-2528 | usgscuucauGfcCfUfUfUfcuacags{invDA} | 2185 | usCfsugua[GNA-G]aaagGfcAfugaagcasusu | 2186 |
| D-2529 | cugcuucaUfgCfCfUfUfsucuacas{invAb} | 2187 | asUfsguagAf[GNA-A]aggCfaUfgaagcagsusu | 2188 |
| D-2530 | cugcuucaUfgCfCfUfsUfucuacas{invAb} | 2189 | asUfsguagAf[GNA-A]aggCfaUfgaagcagsusu | 2190 |
| D-2531 | cugcuucaUfgCfCfUfsUfsucuacas{invAb} | 2191 | asUfsguagAf[GNA-A]aggCfaUfgaagcagsusu | 2192 |
| D-2532 | cugcuucaUfgCfCfUfsUfucuacas{invAb} | 2193 | asUfsguagAfs[GNA-A]aggCfaUfgaagcagsusu | 2194 |
| D-2533 | cugcuucaUfgCfCfUfsUfsucuacas{invAb} | 2195 | asUfsguagAfs[GNA-A]aggCfaUfgaagcagsusu | 2196 |
| D-2534 | cugcuucaUfgCfCfUfUfsucuacas{invAb} | 2197 | asUfsguagAf[sGNA-A]aggCfaUfgaagcagsusu | 2198 |
| D-2535 | cugcuucaUfgCfCfUfsUfsucuacas{invAb} | 2199 | asUfsguagAf[sGNA-A]aggCfaUfgaagcagsusu | 2200 |
| D-2536 | cugcuucaUfgCfCfUfUfsucuacas{invAb} | 2201 | asUfsguagAfs[sGNA-A]aggCfaUfgaagcagsusu | 2202 |
| D-2537 | cugcuucaUfgCfCfUfsUfucuacas{invAb} | 2203 | asUfsguagAfs[sGNA-A]aggCfaUfgaagcagsusu | 2204 |
| D-2538 | cugcuucaUfgCfCfUf[LNA-T]ucuacas{invAb} | 2205 | asUfsguagAf[GNA-A]aggCfaUfgaagcagsusu | 2206 |
| D-2539 | cugcuucaUfgCfCf[LNA-T]Ufucuacas{invAb} | 2207 | asUfsguagAf[GNA-A]aggCfaUfgaagcagsusu | 2208 |
| D-2540 | cugcuucaUfgCfCfUfUf[LNA-T]cuacas{invAb} | 2209 | asUfsguagAf[GNA-A]aggCfaUfgaagcagsusu | 2210 |
| D-2541 | cugcuucaUfgCfCfUfUfuc[LNA-T]acas{invAb} | 2211 | asUfsgu[GNA-A]gAfaaggCfaUfgaagcagsusu | 2212 |
| D-2542 | cugcuucaUfgCfCfUfUfucu[LNA-A]cas{invAb} | 2213 | asUfsg[GNA-U]agAfaaggCfaUfgaagcagsusu | 2214 |
| D-2543 | cugcuucaUfgCfCfUfUfucuac[sLNA-A]{invAb} | 2215 | as[sGNA-U]guagAfaaggCfaUfgaagcagsusu | 2216 |
| D-2544 | cugcuucaUfgCfCfUfUf[LNA-T]cuacas{invAb} | 2217 | asUfsguag[Ab]aaggCfaUfgaagcagsusu | 2218 |
| D-2545 | cugcuucaUfgCfCfUfUfuc[LNA-T]acas{invAb} | 2219 | asUfsgu[Ab]gAfaaggCfaUfgaagcagsusu | 2220 |
| D-2546 | cugcuucaUfgCfCfUfUfucu[LNA-A]cas{invAb} | 2221 | asUfsg[Ab]agAfaaggCfaUfgaagcagsusu | 2222 |
| D-2547 | cugcuucaUfgCfCfUfUfucUfaCfas{invAb} | 2223 | asUfsgUfagAf[GNA-A]aggCfaUfgaagcagsusu | 2224 |
| D-2548 | cugcuucaUfgCfCfUfUfucUfaCfas{invAb} | 2225 | asUfsguagAf[GNA-A]aggCfaUfgaagcagsusu | 2226 |
| D-2549 | cugcuucaUfgCfCfUfs[LNA-T]ucuacas{invAb} | 2227 | asUfsguagAf[GNA-A]aggCfaUfgaagcagsusu | 2228 |
| D-2550 | cugcuucaUfgCfCfUfs[sLNA-T]ucuacas{invAb} | 2229 | asUfsguagAf[GNA-A]aggCfaUfgaagcagsusu | 2230 |
| D-2551 | cugcuucaUfgCfCfUf[LNA-T]ucuacas{invAb} | 2231 | asUfsguagAf[sGNA-A]aggCfaUfgaagcagsusu | 2232 |
| D-2552 | cugcuucaUfgCfCfUf[LNA-T]ucuacas{invAb} | 2233 | asUfsguagAfs[GNA-A]aggCfaUfgaagcagsusu | 2234 |
| D-2553 | usgscuucauGfcCfUfUfUfcu[LNA-A]cags{invDA} | 2235 | usCfsug[Ab]aGfaaagGfcAfugaagcasusu | 2236 |
| D-2554 | usgscuucauGfcCfUfUfUfc[LNA-T]acags{invDA} | 2237 | usCfsugu[Ab]GfaaagGfcAfugaagcasusu | 2238 |
| D-2555 | usgscuucauGfcCfUfUf[LNA-T]cuacags{invDA} | 2239 | usCfsuguaGf[Ab]aagGfcAfugaagcasusu | 2240 |
| D-2556 | usgscuucauGfcCfUfUfUfcuac[LNA-A]gs{invDA} | 2241 | usCfs[GNA-U]guaGfaaagGfcAfugaagcasusu | 2242 |
| D-2557 | usgscuucauGfcCfUfUfUfcu[LNA-A]cags{invDA} | 2243 | usCfsug[GNA-U]aGfaaagGfcAfugaagcasusu | 2244 |
| D-2558 | usgscuucauGfcCfUfUfUfc[LNA-T]acags{invDA} | 2245 | usCfsugu[GNA-A]GfaaagGfcAfugaagcasusu | 2246 |
| D-2559 | usgscuucauGfcCfUfUfUfcuaca[sLNA-G]{invDA} | 2247 | us[Ab]uguaGfaaagGfcAfugaagcasusu | 2248 |
| D-2560 | usgscuucauGfcCfUfUfUfcuac[LNA-A]gs{invDA} | 2249 | usCfs[Ab]guaGfaaagGfcAfugaagcasusu | 2250 |
| D-2561 | ucaugccuUfuCfUfAfCfa[LNA-G]uggcs{invAb} | 2251 | asGfscca[Ab]UfguagAfaAfggcaugasusu | 2252 |
| D-2562 | ucaugccuUfuCfUfAfCfag[LNA-T]ggcs{invAb} | 2253 | asGfscca[Ab]UfguagAfaAfggcaugasusu | 2254 |
| D-2563 | ucaugccuUfuCfUfAfCfasgsuggcs{invAb} | 2255 | asGfscca[Ab]UfguagAfaAfggcaugasusu | 2256 |
| D-2564 | {GalNAc3K2AhxC6}GfgUfaUfgUfuCfCfUfGfcuUfc | 2349 | {Phosphate}asAfsuGfaAfGfcaggAfaCfaUfaCfcsUfs | 2350 |
| | AfuUfsusUf | | u | |
| D-2565 | {GalNAc3K2AhxC6}GfgUfaUfgUfuCfCfUfGfcuUfc | 2351 | {Phosphate}usAfsuGfaAfGfcaggAfaCfaUfaCfcsUfs | 2352 |
| | AfuAfsusUf | | u | |
| D-2566 | {GalNAc3K2AhxC6}GfuAfuGfuUfcCfUfGfCfuuCfa | 2353 | {Phosphate}asCfsaUfgAfAfgcagGfaAfcAfuAfcsUfs | 2354 |
| | UfgUfsusUf | | u | |
| D-2567 | {GalNAc3K2AhxC6}UfaUfgUfuCfcUfGfCfUfucAfu | 2355 | {Phosphate}usGfscAfuGfAfagcaGfgAfaCfaUfasUfs | 2356 |
| | GfcAfsusUf | | u | |
| D-2568 | {GalNAc3K2AhxC6}AfuGfuUfcCfuGfCfUfUfcaUfg | 2357 | {Phosphate}asGfsgCfaUfGfaagcAfgGfaAfcAfusUfs | 2358 |
| | CfcUfsusUf | | u | |
| D-2569 | {GalNAc3K2AhxC6}UfgUfuCfcUfgCfUfUfCfauGfc | 2359 | {Phosphate}asAfsgGfcAfUfgaagCfaGfgAfaCfasUfs | 2360 |
| | CfuUfsusUf | | u | |
| D-2570 | {GalNAc3K2AhxC6}GfuUfcCfuGfcUfUfCfAfugCfc | 2361 | {Phosphate}asAfsaGfgCfAfugaaGfcAfgGfaAfcsUfs | 2362 |
| | UfuUfsusUf | | u | |
| D-2571 | {GalNAc3K2AhxC6}UfuCfcUfgCfuUfCfAfUfgcCfu | 2363 | {Phosphate}asAfsaAfgGfCfaugaAfgCfaGfgAfasUfs | 2364 |
| | UfuUfsusUf | | u | |
| D-2572 | {GalNAc3K2AhxC6}UfuCfcUfgCfuUfCfAfUfgcCfu | 2365 | {Phosphate}usAfsaAfgGfCfaugaAfgCfaGfgAfasUfs | 2366 |
| | UfuAfsusUf | | u | |
| D-2573 | {GalNAc3K2AhxC6}UfcCfuGfcUfuCfAfUfGfccUfu | 2367 | {Phosphate}asGfsaAfaGfGfcaugAfaGfcAfgGfasUfs | 2368 |
| | UfcUfsusUf | | u | |
| D-2574 | {GalNAc3K2AhxC6}CfcUfgCfuUfcAfUfGfCfcuUfu | 2369 | {Phosphate}usAfsgAfaAfGfgcauGfaAfgCfaGfgsUfs | 2370 |
| | CfuAfsusUf | | u | |
| D-2575 | {GalNAc3K2AhxC6}CfuGfcUfuCfaUfGfCfCfuuUfc | 2371 | {Phosphate}asUfsaGfaAfAfggcaUfgAfaGfcAfgsUfs | 2372 |
| | UfaUfsusUf | | u | |
| D-2576 | {GalNAc3K2AhxC6}CfuGfcUfuCfaUfGfCfCfuuUfc | 2373 | {Phosphate}usUfsaGfaAfAfggcaUfgAfaGfcAfgsUfs | 2374 |
| | UfaAfsusUf | | u | |
| D-2577 | {GalNAc3K2AhxC6}UfgCfuUfcAfuGfCfCfUfuuCfu | 2375 | {Phosphate}usGfsuAfgAfAfaggcAfuGfaAfgCfasUfs | 2376 |
| | AfcAfsusUf | | u | |
| D-2578 | {GalNAc3K2AhxC6}GfcUfuCfaUfgCfCfUfUfucUfa | 2377 | {Phosphate}asUfsgUfaGfAfaaggCfaUfgAfaGfcsUfs | 2378 |
| | CfaUfsusUf | | u | |
| D-2579 | {GalNAc3K2AhxC6}GfcUfuCfaUfgCfCfUfUfucUfa | 2379 | {Phosphate}usUfsgUfaGfAfaaggCfaUfgAfaGfcsUfs | 2380 |
| | CfaAfsusUf | | u | |
| D-2580 | {GalNAc3K2AhxC6}CfuUfcAfuGfcCfUfUfUfcuAfc | 2381 | {Phosphate}asCfsuGfuAfGfaaagGfcAfuGfaAfgsUf | 2382 |
| | AfgUfsusUf | | su | |
| D-2581 | {GalNAc3K2AhxC6}UfuCfaUfgCfcUfUfUfCfuaCfa | 2383 | {Phosphate}asAfscUfgUfAfgaaaGfgCfaUfgAfasUfs | 2384 |
| | GfuUfsusUf | | u | |
| D-2582 | {GalNAc3K2AhxC6}UfuCfaUfgCfcUfUfUfCfuaCfa | 2385 | {Phosphate}usAfscUfgUfAfgaaaGfgCfaUfgAfasUfs | 2386 |
| | GfuAfsusUf | | u | |
| D-2583 | {GalNAc3K2AhxC6}UfcAfuGfcCfuUfUfCfUfacAfg | 2387 | {Phosphate}asCfsaCfuGfUfagaaAfgGfcAfuGfasUfs | 2388 |
| | UfgUfsusUf | | u | |
| D-2584 | {GalNAc3K2AhxC6}UfcAfuGfcCfuUfUfCfUfacAfg | 2389 | {Phosphate}usCfsaCfuGfUfagaaAfgGfcAfuGfasUfs | 2390 |
| | UfgAfsusUf | | u | |
| D-2585 | {GalNAc3K2AhxC6}CfaUfgCfcUfuUfCfUfAfcaGfu | 2391 | {Phosphate}asCfscAfcUfGfuagaAfaGfgCfaUfgsUfs | 2392 |
| | GfgUfsusUf | | u | |
| D-2586 | {GalNAc3K2AhxC6}CfaUfgCfcUfuUfCfUfAfcaGfu | 2393 | {Phosphate}usCfscAfcUfGfuagaAfaGfgCfaUfgsUfs | 2394 |
| | GfgAfsusUf | | u | |
| D-2587 | {GalNAc3K2AhxC6}AfuGfcCfuUfuCfUfAfCfagUfg | 2395 | {Phosphate}asGfscCfaCfUfguagAfaAfgGfcAfusUfs | 2396 |
| | GfcUfsusUf | | u | |
| D-2588 | {GalNAc3K2AhxC6}AfuGfcCfuUfuCfUfAfCfagUfg | 2397 | {Phosphate}usGfscCfaCfUfguagAfaAfgGfcAfusUfs | 2398 |
| | GfcAfsusUf | | u | |
| D-2589 | {GalNAc3K2AhxC6}UfgCfcUfuUfcUfAfCfAfguGfg | 2399 | {Phosphate}asGfsgCfcAfCfuguaGfaAfaGfgCfasUfs | 2400 |
| | CfcUfsusUf | | u | |
| D-2590 | {GalNAc3K2AhxC6}GfcCfuUfuCfuAfCfAfGfugGfc | 2401 | {Phosphate}asAfsgGfcCfAfcuguAfgAfaAfgGfcsUfs | 2402 |
| | CfuUfsusUf | | u | |
| D-2591 | {GalNAc3K2AhxC6}GfgUfaUfgUfuCfCfUfGfcuUfc | 2403 | {Phosphate}gsAfsuGfaAfGfcaggAfaCfaUfaCfcsUfs | 2404 |
| | AfuCfsusUf | | u | |
| D-2592 | {GalNAc3K2AhxC6}GfuAfuGfuUfcCfUfGfCfuuCfa | 2405 | {Phosphate}gsGfsaUfgAfAfgcagGfaAfcAfuAfcsUfs | 2406 |
| | UfcCfsusUf | | u | |
| D-2593 | {GalNAc3K2AhxC6}UfaUfgUfuCfcUfGfCfUfucAfu | 2407 | {Phosphate}gsGfsgAfuGfAfagcaGfgAfaCfaUfasUfs | 2408 |
| | CfcCfsusUf | | u | |
| D-2594 | {GalNAc3K2AhxC6}AfuGfuUfcCfuGfCfUfUfcaUfc | 2409 | {Phosphate}gsGfsgGfaUfGfaagcAfgGfaAfcAfusUfs | 2410 |
| | CfcCfsusUf | | u | |
| D-2595 | {GalNAc3K2AhxC6}UfgUfuCfcUfgCfUfUfCfauCfc | 2411 | {Phosphate}asGfsgGfgAfUfgaagCfaGfgAfaCfasUfs | 2412 |
| | CfcUfsusUf | | u | |
| D-2596 | {GalNAc3K2AhxC6}GfuUfcCfuGfcUfUfCfAfucCfc | 2413 | {Phosphate}asAfsgGfgGfAfugaaGfcAfgGfaAfcsUfs | 2414 |
| | CfuUfsusUf | | u | |
| D-2597 | {GalNAc3K2AhxC6}UfuCfcUfgCfuUfCfAfUfccCfc | 2415 | {Phosphate}gsAfsaGfgGfGfaugaAfgCfaGfgAfasUfs | 2416 |
| | UfuCfsusUf | | u | |
| D-2598 | {GalNAc3K2AhxC6}UfcCfuGfcUfuCfAfUfCfccCfu | 2417 | {Phosphate}asGfsaAfgGfGfgaugAfaGfcAfgGfasUfs | 2418 |
| | UfcUfsusUf | | u | |
| D-2599 | {GalNAc3K2AhxC6}CfcUfgCfuUfcAfUfCfCfccUfu | 2419 | {Phosphate}usAfsgAfaGfGfggauGfaAfgCfaGfgsUfs | 2420 |
| | CfuAfsusUf | | u | |
| D-2600 | {GalNAc3K2AhxC6}CfuGfcUfuCfaUfCfCfCfcuUfc | 2421 | {Phosphate}gsUfsaGfaAfGfgggaUfgAfaGfcAfgsUfs | 2422 |
| | UfaCfsusUf | | u | |
| D-2601 | {GalNAc3K2AhxC6}UfgCfuUfcAfuCfCfCfCfuuCfu | 2423 | {Phosphate}usGfsuAfgAfAfggggAfuGfaAfgCfasUfs | 2424 |
| | AfcAfsusUf | | u | |
| D-2602 | {GalNAc3K2AhxC6}GfcUfuCfaUfcCfCfCfUfucUfa | 2425 | {Phosphate}csUfsgUfaGfAfagggGfaUfgAfaGfcsUfs | 2426 |
| | CfaGfsusUf | | u | |
| D-2603 | {GalNAc3K2AhxC6}CfuUfcAfuCfcCfCfUfUfcuAfc | 2427 | {Phosphate}asCfsuGfuAfGfaaggGfgAfuGfaAfgsUf | 2428 |
| | AfgUfsusUf | | su | |
| D-2604 | {GalNAc3K2AhxC6}UfuCfaUfcCfcCfUfUfCfuaCfa | 2429 | {Phosphate}csAfscUfgUfAfgaagGfgGfaUfgAfasUfs | 2430 |
| | GfuGfsusUf | | u | |
| D-2605 | {GalNAc3K2AhxC6}UfcAfuCfcCfcUfUfCfUfacAfg | 2431 | {Phosphate}csCfsaCfuGfUfagaaGfgGfgAfuGfasUfs | 2432 |
| | UfgGfsusUf | | u | |
| D-2606 | {GalNAc3K2AhxC6}CfaUfcCfcCfuUfCfUfAfcaGfu | 2433 | {Phosphate}gsCfscAfcUfGfuagaAfgGfgGfaUfgsUfs | 2434 |
| | GfgCfsusUf | | u | |
| D-2607 | {GalNAc3K2AhxC6}AfuCfcCfcUfuCfUfAfCfagUfg | 2435 | {Phosphate}gsGfscCfaCfUfguagAfaGfgGfgAfusUfs | 2436 |
| | GfcCfsusUf | | u | |
| D-2608 | {GalNAc3K2AhxC6}UfcCfcCfuUfcUfAfCfAfguGfg | 2437 | {Phosphate}asGfsgCfcAfCfuguaGfaAfgGfgGfasUfs | 2438 |
| | CfcUfsusUf | | u | |
| D-2609 | {GalNAc3K2AhxC6}CfcCfcUfuCfuAfCfAfGfugGfc | 2439 | {Phosphate}asAfsgGfcCfAfcuguAfgAfaGfgGfgsUfs | 2440 |
| | CfuUfsusUf | | u | |
| D-2610 | cugcuucaUfgCfCfUfUfucua[LNA-mC]as{invAb} | 2805 | asUfs[GNA-G]uagAfaaggCfaUfgaagcagsusu | 2806 |
| D-2611 | cugcuucaUfgCfCfUfUfucua[LNA-mC]as{invAb} | 2807 | asUfs[Ab]uagAfaaggCfaUfgaagcagsusu | 2808 |
| D-2612 | usgscuucauGfcCfUfUfUfcua[LNA-mC]ags{invDA} | 2809 | usCfsu[Ab]uaGfaaagGfcAfugaagcasusu | 2810 |
| D-2613 | usgscuucauGfcCfUfUfUfcua[LNA-mC]ags{invDA} | 2811 | usCfsu[GNA-G]uaGfaaagGfcAfugaagcasusu | 2812 |
| D-2614 | ucaugccuUfuCfUfAfCfasguggcs{invAb} | 2813 | asGfscca[Ab]UfguagAfaAfggcaugasusu | 2814 |
| D-2615 | ucaugccuUfuCfUfAfCfagsuggcs{invAb} | 2815 | asGfscca[Ab]UfguagAfaAfggcaugasusu | 2816 |
| D-2616 | ucaugccuUfuCfUfAfCfas[LNA-G]uggcs{invAb} | 2817 | asGfscca[Ab]UfguagAfaAfggcaugasusu | 2818 |
| D-2617 | ucaugccuUfuCfUfAfCfas[sLNA-G]uggcs{invAb} | 2819 | asGfscca[Ab]UfguagAfaAfggcaugasusu | 2820 |
| D-2618 | cugcuucaUfgCfCfUfUfucuacas{invAb} | 2821 | as[sMeO-I]guagAfaaggCfaUfgaagcagsusu | 2822 |
| D-2619 | cugcuucaUfgCfCfUfUfucuacas{invAb} | 2823 | asUfsg[MeO-I]agAfaaggCfaUfgaagcagsusu | 2824 |
| D-2620 | cugcuucaUfgCfCfUfUfucuacas{invAb} | 2825 | asUfsgu[MeO-I]gAfaaggCfaUfgaagcagsusu | 2826 |
| D-2621 | cugcuucaUfgCfCfUfUfucuacas{invAb} | 2827 | asUfsgua[MeO-I]AfaaggCfaUfgaagcagsusu | 2828 |
| D-2622 | cugcuucaUfgCfCfUfUfucuacas{invAb} | 2829 | asUfsguagAf[MeO-I]aggCfaUfgaagcagsusu | 2830 |
| D-2623 | cugcuucaUfgCfCfUfUfucuaccs{invAb} | 2831 | as[sMeO-I]guagAfaaggCfaUfgaagcagsusu | 2832 |
| D-2624 | cugcuucaUfgCfCfUfUfucuccas{invAb} | 2833 | asUfsg[MeO-I]agAfaaggCfaUfgaagcagsusu | 2834 |
| D-2625 | cugcuucaUfgCfCfUfUfccuacas{invAb} | 2835 | asUfsguag[MeO-I]aaggCfaUfgaagcagsusu | 2836 |
| D-2626 | cugcuucaUfgCfCfUfCfucuacas{invAb} | 2837 | asUfsguagAf[MeO-I]aggCfaUfgaagcagsusu | 2838 |
| D-2627 | cugcuucaUfgCfCfUfUfucuacus{invAb} | 2839 | asAfsguagAfaaggCfaUfgaagcagsusu | 2840 |
| D-2628 | cugcuucaUfgCfCfUfUfucuucas{invAb} | 2841 | asUfsgaagAfaaggCfaUfgaagcagsusu | 2842 |
| D-2629 | cugcuucaUfgCfCfUfUfucaacas{invAb} | 2843 | asUfsguugAfaaggCfaUfgaagcagsusu | 2844 |
| D-2630 | cugcuucaUfgCfCfUfAfucuacas{invAb} | 2845 | asUfsguagAfuaggCfaUfgaagcagsusu | 2846 |
| D-2631 | ugcuucauGfcCfUfUfUfcuacacs{invAb} | 2847 | as[sMeO-I]uguaGfaaagGfcAfugaagcasusu | 2848 |
| D-2632 | ugcuucauGfcCfUfUfUfcuacags{invAb} | 2849 | asCfs[MeO-I]guaGfaaagGfcAfugaagcasusu | 2850 |
| D-2633 | ugcuucauGfcCfUfUfUfcuacags{invAb} | 2851 | asCfsug[MeO-I]aGfaaagGfcAfugaagcasusu | 2852 |
| D-2634 | ugcuucauGfcCfUfUfUfcuacags{invAb} | 2853 | asCfsugu[MeO-I]GfaaagGfcAfugaagcasusu | 2854 |
| D-2635 | ugcuucauGfcCfUfUfUfcuacags{invAb} | 2855 | asCfsugua[MeO-I]aaagGfcAfugaagcasusu | 2856 |
| D-2636 | ugcuucauGfcCfUfUfUfcuaccgs{invAb} | 2857 | asCfs[MeO-I]guaGfaaagGfcAfugaagcasusu | 2858 |
| D-2637 | ugcuucauGfcCfUfUfUfcuccags{invAb} | 2859 | asCfsug[MeO-I]aGfaaagGfcAfugaagcasusu | 2860 |
| D-2638 | ugcuucauGfcCfUfUfUfccacags{invAb} | 2861 | asCfsugu[MeO-I]GfaaagGfcAfugaagcasusu | 2862 |
| D-2639 | cugcuucaUfgCfCfUfUfucuaaas{invAb} | 2863 | asUfsuuagAfaaggCfaUfgaagcagsusu | 2864 |
| D-2640 | cugcuucaUfgCfCfUfUfuauacas{invAb} | 2865 | asUfsguauAfaaggCfaUfgaagcagsusu | 2866 |
| D-2641 | cugcuucaUfgCfCfUfsUfucuacas{invAb} | 2867 | asUfsguagAf[sGNA-A]aggCfaUfgaagcagsusu | 2868 |
| D-2642 | cugcuucaUfgCfCfUf[LNA-T]ucuacas{invAb} | 2869 | asUfsguagAfs[sGNA-A]aggCfaUfgaagcagsusu | 2870 |
| D-2643 | usgscuucauGfcCfUfUfUfcuaca[sLNA-G]{invDA} | 2871 | us[sGNA-C]uguaGfaaagGfcAfugaagcasusu | 2872 |
| D-2644 | usgscuucauGfcCfUfUf[LNA-T]cuacags{invDA} | 2873 | usCfsuguaGf[GNA-A]aagGfcAfugaagcasusu | 2874 |
| D-2645 | ucaugccuUfuCfUfAfCf[LNA-A]guggcs{invAb} | 2875 | asGfscca[Ab]UfguagAfaAfggcaugasusu | 2876 |
| D-2646 | cugcuucaUfgCfCfUfUfu[LNA-mC]uacas{invAb} | 2877 | asUfsgua[Ab]AfaaggCfaUfgaagcagsusu | 2878 |
| D-2647 | ucaugccuUfuCfUfAfCfa[sLNA-G]uggcs{invAb} | 2879 | asGfscca[Ab]UfguagAfaAfggcaugasusu | 2880 |
| D-2648 | cugcuucaUfgCfCfUfUfucuacas{invAb} | 2881 | asUfs[MeO-I]uagAfaaggCfaUfgaagcagsusu | 2882 |
| D-2649 | cugcuucaUfgCfCfUfUfucuagas{invAb} | 2883 | asUfscuagAfaaggCfaUfgaagcagsusu | 2884 |
| D-2650 | cugcuucaUfgCfCfUfUfacuacas{invAb} | 2885 | asUfsguagUfaaggCfaUfgaagcagsusu | 2886 |
| D-2651 | ugcuucauGfcCfUfUfUfcuacags{invAb} | 2887 | asCfsu[MeO-I]uaGfaaagGfcAfugaagcasusu | 2888 |
| D-2652 | ugcuucauGfcCfUfUfUfcuacags{invAb} | 2889 | asCfsuguaGf[MeO-I]aagGfcAfugaagcasusu | 2890 |
| D-2653 | ugcuucauGfcCfUfUfCfcuacags{invAb} | 2891 | asCfsuguaGf[MeO-I]aagGfcAfugaagcasusu | 2892 |
| D-2654 | cugcuucaUfgCfCfUfUfucuauas{invAb} | 2893 | asUfsauagAfaaggCfaUfgaagcagsusu | 2894 |
| D-2655 | cugcuucaUfgCfCfUfUfuuuacas{invAb} | 2895 | asUfsguaaAfaaggCfaUfgaagcagsusu | 2896 |
| D-2656 | cugcuucaUfgCfCfUfUfucuacas{invAb} | 2897 | asUfsguagAf[GNA-A]aggCfaUfgaagcagsusu | 2898 |
| D-2657 | cugcuucaUfgCfCfUfUfsucuacas{invAb} | 2899 | asUfsguagAfs[GNA-A]aggCfaUfgaagcagsusu | 2900 |
| D-2658 | cugcuucaUfgCfCfUfUf[LNA-T]cuacas{invAb} | 2901 | asUfsguag[GNA-A]aaggCfaUfgaagcagsusu | 2902 |
| D-2659 | cugcuucaUfgCfCfUf[LNA-T]ucuacas{invAb} | 2903 | asUfsguagAf[Ab]aggCfaUfgaagcagsusu | 2904 |
| D-2660 | cugcuucaUfgCfCfUfUfucuac[sLNA-A]{invAb} | 2905 | as[sAb]guagAfaaggCfaUfgaagcagsusu | 2906 |
| D-2661 | cugcuucaUfgCfCfUfUfu[LNA-mC]uacas{invAb} | 2907 | asUfsgua[GNA-G]AfaaggCfaUfgaagcagsusu | 2908 |
| D-2662 | usgscuucauGfcCfUfUfUf[LNA-mC]uacags{invDA} | 2909 | usCfsugua[Ab]aaagGfcAfugaagcasusu | 2910 |
| D-2663 | cugcuucaUfgCfCfUfUfucuacas{invAb} | 2911 | asUfsguag[MeO-I]aaggCfaUfgaagcagsusu | 2912 |
| D-2664 | cugcuucaUfgCfCfUfsUfsucuacas{invAb} | 2913 | asUfsguagAfs[sGNA-A]aggCfaUfgaagcagsusu | 2914 |
| D-2665 | cugcuucaUfgCfCfUf[sLNA-T]ucuacas{invAb} | 2915 | asUfsguagAf[GNA-A]aggCfaUfgaagcagsusu | 2916 |
| D-2666 | {sGalNAc3K2AhxC6}cusgcuucaUfgCfCfUfUfucUf | 2917 | asUfsguagAf[GNA-A]aGfgCfaUfgaagcagsusu | 2918 |
| | aCfas{invAb} | | | |
| D-2667 | {sGalNAc3K2AhxC6}cugcuuCfaUfGfCfCfuuucuac | 2919 | asUfsgUfaGfa[GNA-A]aggcaUfgAfagcagsusu | 2920 |
| | as{invAb} | | | |
| D-2668 | {sGalNAc3K2AhxC6}cugcuuCfaUfGfCfCfuuucuac | 2921 | asUfsgUfaGfa[GNA-A]AfggcaUfgAfagcagsusu | 2922 |
| | as{invAb} | | | |
| D-2669 | {sGalNAc3K2AhxC6}cugcuuCfaUfgCfcuuucuacas | 2923 | asUfsguaga[GNA-A]aggCfaUfgAfagcagsusu | 2924 |
| | {invAb} | | | |
| D-2670 | {sGalNAc3K2AhxC6}cugcuucaUfgCfcUfuucuacas | 2925 | asUfsguagAf[GNA-A]AfggCfaUfgaagcagsusu | 2926 |
| | {invAb} | | | |
| D-2671 | {sGalNAc3K2AhxC6}cugcuucaUfgCfcUfuucuacas | 2927 | asUfsguaga[GNA-A]AfggCfaUfgaagcagsusu | 2928 |
| | {invAb} | | | |
| D-2672 | {sGalNAc3K2AhxC6}cugcuucaUfgCfCfUf[LNA- | 2929 | asUfsguagAf[GNA-A]aggCfaUfgaagcagsusu | 2930 |
| | T]ucuacas{invAb} | | | |
| D-2673 | {sGalNAc3K2AhxC6}cugcuucaUfgCfCfUfUfucua[ | 2931 | asUfs[GNA-G]uagAfaaggCfaUfgaagcagsusu | 2932 |
| | LNA-mC]as{invAb} | | | |
| D-2674 | {sGalNAc3K2AhxC6}ucaugccuUfuCfUfAfCfa[LNA | 2933 | asGfscca[Ab]UfguagAfaAfggcaugasusu | 2934 |
| | -G]uggcs{invAb} | | | |
| D-2675 | {sGalNAc3K2AhxC6}cugcuucaUfgGfGfAfUfucuac | 2935 | asUfsguagAfauccCfaUfgaagcagsusu | 2936 |
| | as{invAb} | | | |
| D-2676 | {sGalNAc3K2AhxC6}cugcuucaUfgCfCfUfUfucuac | 2937 | asUfsguaGfa[GNA-A]AfggCfaUfgaagcagsusu | 2938 |
| | as{invAb} | | | |
| D-2677 | {sGalNAc3K2AhxC6}guauguucCfuGfCfUfUfcaugc | 2939 | asGfsgcauGfaagcAfgGfaacauacsusu | 2940 |
| | cs{invAb} | | | |
| D-2678 | {sGalNAc3K2AhxC6}uguccugcUfuCfAfUfGfccuuu | 2941 | asGfsaaagGfcaugAfaGfcaggacasusu | 2942 |
| | cs{invAb} | | | |
| D-2679 | {sGalNAc3K2AhxC6}gcuucaugCfcUfUfUfCfuacag | 2943 | asAfscuguAfgaaaGfgCfaugaagcsusu | 2944 |
| | us{invAb} | | | |
| D-2680 | {sGalNAc3K2AhxC6}cuucaugcCfuUfUfCfUfacagu | 2945 | asCfsacugUfagaaAfgGfcaugaagsusu | 2946 |
| | gs{invAb} | | | |
| D-2681 | {sGalNAc3K2AhxC6}uucaugccUfuUfCfUfAfcagug | 2947 | asCfscacuGfuagaAfaGfgcaugaasusu | 2948 |
| | gs{invAb} | | | |
| D-2682 | {sGalNAc3K2AhxC6}cugcuucaUfgCfCfUfUfucaac | 2949 | asUfsguugAfaaggCfaUfgaagcagsusu | 2950 |
| | as{invAb} | | | |
| D-2683 | {sGalNAc3K2AhxC6}cugcuucaUfgCfCfUfUfucucc | 2951 | asUfsg[MeO-I]agAfaaggCfaUfgaagcagsusu | 2952 |
| | as{invAb} | | | |
| D-2684 | {sGalNAc3K2AhxC6}ugcuucauGfcCfUfUfUfcucca | 2953 | asCfsug[MeO-I]aGfaaagGfcAfugaagcasusu | 2954 |
| | gs{invAb} | | | |
| D-2685 | {sGalNAc3K2AhxC6}cugcuucaUfgCfCfUfUfucuac | 2955 | asUfsgu[MeO-I]gAfaaggCfaUfgaagcagsusu | 2956 |
| | as{invAb} | | | |
| D-2686 | {sGalNAc3K2AhxC6}ugcuucauGfcCfUfUfUfcuaca | 2957 | asCfsugu[MeO-I]GfaaagGfcAfugaagcasusu | 2958 |
| | gs{invAb} | | | |
| D-2687 | {sGalNAc3K2AhxC6}cugcuucaUfgCfCfUfUfucuac | 2959 | asUfsgua[MeO-I]AfaaggCfaUfgaagcagsusu | 2960 |
| | as{invAb} | | | |
| D-2688 | {sGalNAc3K2AhxC6}ugcuucauGfcCfUfUfUfcuaca | 2961 | asCfsugua[MeO-I]aaagGfcAfugaagcasusu | 2962 |
| | gs{invAb} | | | |
| D-2689 | {sGalNAc3K2AhxC6}cugcuucaUfgCfCfUfUfccuac | 2963 | asUfsguag[MeO-I]aaggCfaUfgaagcagsusu | 2964 |
| | as{invAb} | | | |
| D-2690 | {sGalNAc3K2AhxC6}cugcuucaUfgCfCfUfCfucuac | 2965 | asUfsguagAf[MeO-I]aggCfaUfgaagcagsusu | 2966 |
| | as{invAb} | | | |
| D-2691 | {sGalNAc3K2AhxC6}usgscuucauGfcCfUfUfUfcu[ | 2967 | usCfsug[Ab]aGfaaagGfcAfugaagcasusu | 2968 |
| | LNA-A]cags{invDA} | | | |
| D-2692 | {sGalNAc3K2AhxC6}usgscuucauGfcCfUfUfUfcua | 2969 | usCfs[GNA-U]guaGfaaagGfcAfugaagcasusu | 2970 |
| | c[LNA-A]gs{invDA} | | | |
| D-2693 | {sGalNAc3K2AhxC6}ucaugccuUfuCfUfAfCfasgsu | 2971 | asGfscca[Ab]UfguagAfaAfggcaugasusu | 2972 |
| | ggcs{invAb} | | | |
| D-2694 | {sGalNAc3K2AhxC6}cugcuucaUfgCfCfUfUfuc[LN | 2973 | asUfsgu[GNA-A]gAfaaggCfaUfgaagcagsusu | 2974 |
| | A-T]acas{invAb} | | | |
| D-2695 | {sGalNAc3K2AhxC6}cugcuucaUfgCfCfUfUfuc[LN | 2975 | asUfsgu[Ab]gAfaaggCfaUfgaagcagsusu | 2976 |
| | A-T]acas{invAb} | | | |
| D-2696 | {sGalNAc3K2AhxC6}usgscuucauGfcCfUfUfUfc[L | 2977 | usCfsugu[GNA-A]GfaaagGfcAfugaagcasusu | 2978 |
| | NA-TIacags{invDA} | | | |
| D-2697 | {sGalNAc3K2AhxC6}usgscuucauGfcCfUfUfUfcua | 2979 | usCfsu[GNA-G]uaGfaaagGfcAfugaagcasusu | 2980 |
| | [LNA-mC]ags{invDA} | | | |
| D-2698 | {sGalNAc3K2AhxC6}ucaugccuUfuCfUfAfCfas[sL | 2981 | asGfscca[Ab]UfguagAfaAfggcaugasusu | 2982 |
| | NA-G]uggcs{invAb} | | | |
| D-2699 | {sGalNAc3K2AhxC6}cugcuucaUfgCfCfUfUfucuac | 2983 | asUfs[MeO-I]uagAfaaggCfaUfgaagcagsusu | 2984 |
| | as{invAb} | | | |
| D-2700 | {sGalNAc3K2AhxC6}cugcuucaUfgCfCfUfUfucuac | 2985 | asUfsguag[MeO-I]aaggCfaUfgaagcagsusu | 2986 |
| | as{invAb} | | | |
| D-2701 | {sGalNAc3K2AhxC6}cugcuucaUfgCfCfUfUfacuac | 2987 | asUfsguagUfaaggCfaUfgaagcagsusu | 2988 |
| | as{invAb} | | | |
| D-2702 | {sGalNAc3K2AhxC6}ugcuucauGfcCfUfUfUfcuaca | 2989 | asCfsuguaGf[MeO-I]aagGfcAfugaagcasusu | 2990 |
| | gs{invAb} | | | |
| D-2703 | {sGalNAc3K2AhxC6}ugcuucauGfcCfUfUfCfcuaca | 2991 | asCfsuguaGf[MeO-I]aagGfcAfugaagcasusu | 2992 |
| | gs{invAb} | | | |
| D-2704 | {sGalNAc3K2AhxC6}ugcuucauGfcCfUfUfUfcuaca | 2993 | asCfsu[MeO-I]uaGfaaagGfcAfugaagcasusu | 2994 |
| | gs{invAb} | | | |
| D-2705 | {sGalNAc3K2AhxC6}cugcuucaUfgCfCfUfUfucusa | 2995 | asUfsgu[MeO-I]gAfaaggCfaUfgaagcagsusu | 2996 |
| | cas{invAb} | | | |
| D-2706 | {sGalNAc3K2AhxC6}cugcuucaUfgCfCfUfUfucsua | 2997 | asUfsgu[MeO-I]gAfaaggCfaUfgaagcagsusu | 2998 |
| | cas{invAb} | | | |
| D-2707 | {sGalNAc3K2AhxC6}cugcuucaUfgCfCfUfUfucsus | 2999 | asUfsgu[MeO-I]gAfaaggCfaUfgaagcagsusu | 3000 |
| | acas{invAb} | | | |
| D-2708 | {sGalNAc3K2AhxC6}cugcuucaUfgCfCfUfUfuscua | 3001 | asUfsguag[MeO-I]aaggCfaUfgaagcagsusu | 3002 |
| | cas{invAb} | | | |
| D-2709 | {sGalNAc3K2AhxC6}ucaugccuUfuCfUfAfCfa[sLN | 3003 | asGfscca[ANUfguagAfaAfggcaugasusu | 3004 |
| | A-G]uggcs{invAb} | | | |
| D-2710 | {sGalNAc3K2AhxC6}ucaugccuUfuCfUfAfCf[LNA- | 3005 | asGfscca[ANUfguagAfaAfggcaugasusu | 3006 |
| | A]guggcs{invAb} | | | |
| D-2711 | {sGalNAc3K2AhxC6}cugcuucaUfgGfGfAfUfugua | 3007 | asUfsguacAfauccCfaUfgaagcagsusu | 3008 |
| | cas{invAb} | | | |
| D-2712 | {sGalNAc3K2AhxC6}cugcuucaUfgCfCfUfUfuc[LN | 3009 | asUfsgu[MeO-I]gAfaaggCfaUfgaagcagsusu | 3010 |
| | A-T]acas{invAb} | | | |
| D-2713 | {sGalNAc3K2AhxC6}ugcuucauGfcCfUfUfUf[LNA- | 3011 | asCfsugua[MeO-I]aaagGfcAfugaagcasusu | 3012 |
| | mquacags{invAb} | | | |
| D-2714 | {sGalNAc3K2AhxC6}cugcuuCfaUfGfCfCfu[LNA- | 3013 | asUfsgUfaGfa[GNA-A]aggcaUfgAfagcagsusu | 3014 |
| | T]ucuacas{invAb} | | | |
| D-2715 | {sGalNAc3K2AhxC6}cugcuuCfaUfGfCfCfu[LNA- | 3015 | asUfsgUfaGfa[GNA-A]AfggcaUfgAfagcagsusu | 3016 |
| | T]ucuacas{invAb} | | | |
| D-2716 | {sGalNAc3K2AhxC6}cugcuucaUfgCfCfUfUf[LNA- | 3017 | asUfsguag[MeO-I]aaggCfaUfgaagcagsusu | 3018 |
| | T]cuacas{invAb} | | | |
| D-2717 | {sGalNAc3K2AhxC6}ucaugcCfuUfuCfuacaguggcs | 3019 | asGfsccacuguagAfaAfgGfcaugasusu | 3020 |
| | {invAb} | | | |
| D-2718 | {sGalNAc3K2AhxC6}uauguuCfcUfgCfuucaugccus | 3021 | asAfsggcaugaagCfaGfgAfacauasusu | 3022 |
| | {invAb} | | | |
| D-2719 | {sGalNAc3K2AhxC6}ugcuucAfuGfcCfuuucuacags | 3023 | asCfsuguagaaagGfcAfuGfaagcasusu | 3024 |
| | {invAb} | | | |
| D-2720 | {sGalNAc3K2AhxC6}uguuccUfgCfUfUfCfaugccuu | 3025 | asAfsggcaUfgaagCfaGfgaacasusu | 3026 |
| | us{invAb} | | | |
| D-2721 | {sGalNAc3K2AhxC6}cugcuuCfaUfgCfcuuucuacas | 3027 | asUfsguagaaaggCfaUfgAfagcagsusu | 3028 |
| | {invAb} | | | |
| D-2722 | {sGalNAc3K2AhxC6}uauguuccUfgCfuUfCfaugccu | 3029 | asAfsggcaUfgaagCfaGfgaacauasusu | 3030 |
| | s{invAb} | | | |
| D-2723 | {sGalNAc3K2AhxC6}uguuccUfgCfUfUfCfaugccus | 3031 | asAfsggcaUfgaagCfaGfgaacasusu | 3032 |
| | {invAb} | | | |
| D-2724 | {sGalNAc3K2AhxC6}uauguuCfcUfgCfuucaugccu | 3033 | asAfsggcaugaagCfaGfgAfacauasusu | 3034 |
| | us{invAb} | | | |
| D-2725 | {sGalNAc3K2AhxC6}uauguuCfcUfgCfuucaugccus | 3035 | asAfsggcaugaagCfaGfgAfacauascsc | 3036 |
| | {invAb} | | | |
| D-2726 | {sGalNAc3K2AhxC6}uauguuCfcUfgCfuucaugccu | 3037 | asAfsggcaugaagCfaGfgAfacauascsc | 3038 |
| | us{invAb} | | | |
| D-2727 | uauguuccUfgCfUfUfCfaugccus{invAb} | 3039 | asAfsggcaUfgaagCfaGfgaacauasusu | 3040 |
| D-2728 | uauguuccUfgCfUfUfCfaugcgus{invAb} | 3041 | asAfscgcaUfgaagCfaGfgaacauasusu | 3042 |
| D-2729 | uauguuccUfgCfUfUfCfauggcus{invAb} | 3043 | asAfsgccaUfgaagCfaGfgaacauasusu | 3044 |
| D-2730 | uauguuccUfgCfUfUfCfaagccus{invAb} | 3045 | asAfsggcuUfgaagCfaGfgaacauasusu | 3046 |
| D-2731 | uauguuccUfgCfUfUfCfuugccus{invAb} | 3047 | asAfsggcaAfgaagCfaGfgaacauasusu | 3048 |
| D-2732 | uauguuccUfgCfUfUfGfaugccus{invAb} | 3049 | asAfsggcaUfcaagCfaGfgaacauasusu | 3050 |
| D-2733 | uauguuccUfgCfUfAfCfaugccus{invAb} | 3051 | asAfsggcaUfguagCfaGfgaacauasusu | 3052 |
| D-2734 | uauguuccUfgCfAfUfCfaugccus{invAb} | 3053 | asAfsggcaUfgaugCfaGfgaacauasusu | 3054 |
| D-2735 | uauguuccUfgGfUfUfCfaugccus{invAb} | 3055 | asAfsggcaUfgaacCfaGfgaacauasusu | 3056 |
| D-2736 | uauguuccUfcCfUfUfCfaugccus{invAb} | 3057 | asAfsggcaUfgaagGfaGfgaacauasusu | 3058 |
| D-2737 | uauguuccAfgCfUfUfCfaugccus{invAb} | 3059 | asAfsggcaUfgaagCfuGfgaacauasusu | 3060 |
| D-2738 | uauguucgUfgCfUfUfCfaugccus{invAb} | 3061 | asAfsggcaUfgaagCfaCfgaacauasusu | 3062 |
| D-2739 | uauguugcUfgCfUfUfCfaugccus{invAb} | 3063 | asAfsggcaUfgaagCfaGfcaacauasusu | 3064 |
| D-2740 | uauguaccUfgCfUfUfCfaugccus{invAb} | 3065 | asAfsggcaUfgaagCfaGfguacauasusu | 3066 |
| D-2741 | uaugauccUfgCfUfUfCfaugccus{invAb} | 3067 | asAfsggcaUfgaagCfaGfgaucauasusu | 3068 |
| D-2742 | uaucuuccUfgCfUfUfCfaugccus{invAb} | 3069 | asAfsggcaUfgaagCfaGfgaagauasusu | 3070 |
| D-2743 | uaaguuccUfgCfUfUfCfaugccus{invAb} | 3071 | asAfsggcaUfgaagCfaGfgaacuuasusu | 3072 |
| D-2744 | uuuguuccUfgCfUfUfCfaugccus{invAb} | 3073 | asAfsggcaUfgaagCfaGfgaacaaasusu | 3074 |
| D-2745 | aauguuccUfgCfUfUfCfaugccus{invAb} | 3075 | asAfsggcaUfgaagCfaGfgaacauususu | 3076 |
| D-2746 | ucaugccuUfuCfUfAfCfaguggcs{invAb} | 3077 | asGfsccacUfguagAfaAfggcaugasusu | 3078 |
| D-2747 | ucaugccuUfuCfUfAfCfagugggs{invAb} | 3079 | asCfsccacUfguagAfaAfggcaugasusu | 3080 |
| D-2748 | ucaugccuUfuCfUfAfCfagugccs{invAb} | 3081 | asGfsgcacUfguagAfaAfggcaugasusu | 3082 |
| D-2749 | ucaugccuUfuCfUfAfCfagucgcs{invAb} | 3083 | asGfscgacUfguagAfaAfggcaugasusu | 3084 |
| D-2750 | ucaugccuUfuCfUfAfCfagaggcs{invAb} | 3085 | asGfsccucUfguagAfaAfggcaugasusu | 3086 |
| D-2751 | ucaugccuUfuCfUfAfCfacuggcs{invAb} | 3087 | asGfsccagUfguagAfaAfggcaugasusu | 3088 |
| D-2752 | ucaugccuUfuCfUfAfCfuguggcs{invAb} | 3089 | asGfsccacAfguagAfaAfggcaugasusu | 3090 |
| D-2753 | ucaugccuUfuCfUfAfGfaguggcs{invAb} | 3091 | asGfsccacUfcuagAfaAfggcaugasusu | 3092 |
| D-2754 | ucaugccuUfuCfUfUfCfaguggcs{invAb} | 3093 | asGfsccacUfgaagAfaAfggcaugasusu | 3094 |
| D-2755 | ucaugccuUfuCfAfAfCfaguggcs{invAb} | 3095 | asGfsccacUfguugAfaAfggcaugasusu | 3096 |
| D-2756 | ucaugccuUfuGfUfAfCfaguggcs{invAb} | 3097 | asGfsccacUfguacAfaAfggcaugasusu | 3098 |
| D-2757 | ucaugccuAfuCfUfAfCfaguggcs{invAb} | 3099 | asGfsccacUfguagAfuAfggcaugasusu | 3100 |
| D-2758 | ucaugcguUfuCfUfAfCfaguggcs{invAb} | 3101 | asGfsccacUfguagAfaAfcgcaugasusu | 3102 |
| D-2759 | ucauggcuUfuCfUfAfCfaguggcs{invAb} | 3103 | asGfsccacUfguagAfaAfgccaugasusu | 3104 |
| D-2760 | ucaagccuUfuCfUfAfCfaguggcs{invAb} | 3105 | asGfsccacUfguagAfaAfggcuugasusu | 3106 |
| D-2761 | ucuugccuUfuCfUfAfCfaguggcs{invAb} | 3107 | asGfsccacUfguagAfaAfggcaagasusu | 3108 |
| D-2762 | ugaugccuUfuCfUfAfCfaguggcs{invAb} | 3109 | asGfsccacUfguagAfaAfggcaucasusu | 3110 |
| D-2763 | acaugccuUfuCfUfAfCfaguggcs{invAb} | 3111 | asGfsccacUfguagAfaAfggcaugususu | 3112 |
| D-2764 | ucaugccuUfaCfUfAfCfaguggcs{invAb} | 3113 | asGfsccacUfguagUfaAfggcaugasusu | 3114 |
| D-2765 | {sGalNAc3K2AhxC6}augccuUfuCfUfAfCfaguggcu | 3115 | asGfsccacUfguagAfaAfggcaususu | 3116 |
| | sus{invAb} | | | |
| D-2766 | {sGalNAc3K2AhxC6}augccuUfuCfUfAfCfaguggcs | 3117 | asGfsccacUfguagAfaAfggcaususu | 3118 |
| | {invAb} | | | |
| D-2767 | {sGalNAc3K2AhxC6}ucaugccuUfuCfuAfCfaguggc | 3119 | asGfsccacUfguagAfaAfggcaugasusu | 3120 |
| | s{invAb} | | | |
| D-2768 | {sGalNAc3K2AhxC6}[invAb]augccuUfUfCfUfacag | 3121 | asGfsccacUfguagaaAfgGfcaususu | 3122 |
| | uggscsu | | | |
| D-2769 | {sGalNAc3K2AhxC6}ucaugcCfuUfuCfuacaguggcu | 3123 | asGfsccacuguagAfaAfgGfcaugasusu | 3124 |
| | s{invAb} | | | |
| D-2770 | {sGalNAc3K2AhxC6}ucaugcCfuUfuCfuacaguggcs | 3125 | asGfsccacuguagAfaAfgGfcaugasasc | 3126 |
| | {invAb} | | | |
| D-2771 | {sGalNAc3K2AhxC6}ucaugcCfuUfuCfuacaguggcu | 3127 | asGfsccacuguagAfaAfgGfcaugasasc | 3128 |
| | s{invAb} | | | |
| D-2772 | {sGalNAc3K2AhxC6}ucaugccuUfuCfUfAfCfagugg | 3129 | asGfsccacUfguagAfaAfggcaugasusu | 3130 |
| | cus{invAb} | | | |
| D-2773 | {sGalNAc3K2AhxC6}ucaugccuUfuCfUfAfCfagugg | 3131 | asGfsccacUfguagAfaAfggcaugasasc | 3132 |
| | cs{invAb} | | | |
| D-2774 | {sGalNAc3K2AhxC6}ucaugccuUfuCfUfAfCfagugg | 3133 | asGfsccacUfguagAfaAfggcaugasasc | 3134 |
| | cus{invAb} | | | |
| D-2775 | {sGalNAc3K2AhxC6}cugcuucaUfgCfCfUfUfu[LNA | 3135 | asUfsgua[MeO-I]AfaaggCfaUfgaagcagsusu | 3136 |
| | -mC]uacas{invAb} | | | |
| D-2776 | {GalNAc3K2AhxC6}gcggcuUfcGfAfCfGfgcuucuas | 3137 | {Phosphate}usAfsgAfaGfCfcgucGfaAfgccgcsusu | 3138 |
| | usu | | | |
| D-2777 | {GalNAc3K2AhxC6}gcggcuUfcGfAfCfGfgguucuas | 3139 | {Phosphate}usAfsgAfaCfCfcgucGfaAfgccgcsusu | 3140 |
| | usu | | | |
| D-2778 | {GalNAc3K2AhxC6}gcggcuUfcGfAfCfGfccuucuas | 3141 | {Phosphate}usAfsgAfaGfGfcgucGfaAfgccgcsusu | 3142 |
| | usu | | | |
| D-2779 | {GalNAc3K2AhxC6}gcggcuUfcGfAfCfCfgcuucuas | 3143 | {Phosphate}usAfsgAfaGfCfggucGfaAfgccgcsusu | 3144 |
| | usu | | | |
| D-2780 | {GalNAc3K2AhxC6}gcggcuUfcCfUfGfGfgcuucuas | 3145 | [sInvAb]usAfgAfaGfCfccagGfaAfgccgcsusu | 3146 |
| | usu | | | |
| D-2781 | {sGalNAc3K2AhxC6}[invAb]gcuucaUfgGfGfAfUf | 3147 | {Phosphate}asUfsgUfaCfAfauccCfaUfgaagcsusu | 3148 |
| | uguacaususu | | | |
| D-2782 | {sGalNAc3K2AhxC6}ucaugccuUfuGfAfUfCfacugg | 3149 | asGfsccagUfgaucAfaAfggcaugasusu | 3150 |
| | cs{invAb} | | | |
| D-2783 | {sGalNAc3K2AhxC6}cugcuucaUfgCfCfUfUfucuac | 3151 | csUfsguagAfaaggCfaUfgaagcagsusu | 3152 |
| | asc | | | |
| D-2784 | {sGalNAc3K2AhxC6}[invAb]cuucauGfcGfAfAfUfc | 3153 | {Phosphate}asCfsuGfuUfGfauucGfcAfugaagsusu | 3154 |
| | aAfcAfgUfsusUf | | | |
| D-2785 | {sGalNAc3K2AhxC6}ggccuuAfuCfCfCfuccuuccus | 3155 | usAfsaggAfaGfGfagggAfuAfaggccsasc | 3156 |
| | usa | | | |
| D-2786 | {sGalNAc3K2AhxC6}gugucuGfaGfUfUfccauuccas | 3157 | usUfsuggAfaUfGfgaacUfcAfgacacscsa | 3158 |
| | asa | | | |

### Example 2: Efficacy of Select PNPLA3 siRNA Molecules in RNA FISH Assay

[0185] A panel of fully chemically modified siRNA, including siRNA spanning the rs738409 and/or the rs738408 SNP in PNPLA3, were prepared and tested for potency and selectivity of mRNA knockdown in vitro. Each siRNA duplex consisted of two strands, the sense or ‘passenger’ strand and the antisense or ‘guide’ strand. The strands are 21 or 23 nucleotides in length with 19 complementary base pairs. In some instances, there are two base pair 3′ overhangs. The siRNA were prepared with substitution of the natural 2′-OH in the ribose of each nucleotide with either a 2′-OMe or 2′-F group. Optionally, phosphosdiester internucleotide linkages at one or both strands were replaced with phosphorothioates to reduce degradation by exonucleases.

[0186] The efficacy of each of the siRNA molecules in reducing PNPLA3 expression was assessed using a 384-well format in vitro siRNA transfection assay followed by a fluorescent in situ hybridization targeting ribonucleic acid molecules (RNA FISH) assay to determine IC50 and maximum activity values. This assay was performed on human hepatocellular carcinoma cell line Hep3B cells (ATCC HB-8064) and Chinese hamster ovary (CHO) cells expressing human PNPLA3 I148I. Human hepatocellular carcinoma HepB3 was maintained in EMEM media (ATCC 30-2003) supplemented with 10% fetal bovine serum and 1% antibiotic/antimycotic at 37° C. and 5% CO2. CHO cells expressing human PNPLA3 I148I was maintained in media containing 50% CD-CHO (Life Technologies), 50% Ex-Cell CHO 5 Medium (Sigma), 8 mM L-Glutamine, 1×HT, 1% antibiotic/antimycotic, and 10 μg/mL Puromycin at 37° C. and 5% CO2.

[0187] For Hep3B cell assays, transfection complexes of the siRNA molecules and the Lipofectamine RNAIMAX transfection reagent (Life Technologies) in EMEM media (ATCC 30-2003) were prepared in 384-well plates (PerkinElmer), at 10 μg per well, in accordance with manufacturer's recommendations. For CHO human cell assays, transfection complexes of the siRNA molecules and the Lipofectamine RNAIMAX transfection reagent in F12K media (Mediatech) were prepared in 384-well plates, at 10 μg per well, in accordance with manufacturer's recommendations. Cells were diluted to 67,000 cells/ml in antibiotic/antimycotic-free media and 30 μl added to each well, a final density of 2000 cells/well in 40 μl media. After a 20 minute incubation at room temperature, plates were transferred to a 37° C. and 5% CO2 incubator. Hep3B cell transfection assays were incubated for 72 hours and CHO human PNPLA3 I148I transfection assays were incubated for 48 hours.

[0188] At harvest, the cells were fixed in an 8% formaldehyde fixative solution (Thermo Scientific) for 15 minutes at room temperature. The plates were then subjected to dehydration with sequential 50%, 70%, and 100% ethanol washes. Plates were then sealed and stored at −20° C.

[0189] The RNA FISH assay was performed using the Affymetrix QuantiGene® View RNA HC Screening Assay kit (QVP0011), the Affymetrix View HC Signal Amplification Kit 3-plex (QVP0213), and Affymetrix gene specific probes: PNPLA3 Human 0.33 mL View RNA Type 6 (650 label) VA6-20279-01 and PPIB Human 0.44 mL View RNA Type 1 (488 label) VA1-10148-01.

[0190] Plates were first rehydrated with sequential 100%, 70%, and 50% ethanol washes. Cells were then washed with PBS, and then permeabilized and protease-digested according to the kit instructions. The target Working Probe Sets were prepared according to the manufacturer's protocol, added to the wells, and incubated for 3 hours at 40° C. The manufacturer's protocol was followed for the sequential hybridizations with the Working Probe Sets, the Working PreAmps, the Working Amps, and the Working LPs. Last, nuclei counterstains were applied (Hoechst 33342 and Cell Mask Blue; Molecular Probes). Plates were incubated for 30 minutes at room temperature, washed with PBS, overlaid with 80 μl of PBS, and then the plates were sealed for imaging.

[0191] All plates were imaged on an Opera Phenix High Content Screening System (PerkinElmer), using the UV Channel for Hoechst 33342 and Cell Mask Blue, the 488 Channel for Type1 probes, and the 647 Channel for Type6 probes.

[0192] RNA FISH data was analyzed using Columbus software and images were generated using Genedata Screener. The results of the assay for CHO transfected PNPLA3 I148I are shown in Table 3. The results of the assay for CHO transfected PNPLA3 I148M are shown in Table 4. PNPLA3 knockdown provides a percentage of knockdown compared to control. Negative values indicate a decrease in PNPLA3 levels.

TABLE 3
RNA FISH assay on CHO transfected PNPLA3 I148I

| Duplex No. | IC50 (μM) | PNPLA3 knockdown (%) |
|---|---|---|
| D-2001 | .0589 | −33.9 |
| D-2002 | .0158 | −67.2 |
| D-2003 | .0427 | −43.4 |
| D-2004 | .00835 | −63.5 |
| D-2006 | .0177 | −77.8 |
| D-2008 | .125 | −10.7 |
| D-2009 | .00769 | −45.5 |
| D-2010 | .00558 | −80 |
| D-2011 | .035 | −3 |
| D-2012 | >0.5 | −3.7 |
| D-2013 | .036 | −6.4 |
| D-2014 | .0122 | −58.2 |
| D-2015 | >0.5 | 8 |
| D-2016 | >0.5 | 8 |
| D-2017 | .0153 | −73.2 |
| D-2018 | .00386 | −31.5 |
| D-2019 | .125 | |
| D-2020 | >0.5 | |
| D-2021 | >0.5 | 8 |
| D-2022 | >0.167 | −6.8 |
| D-2023 | .0257 | −36.9 |
| D-2024 | >0.5 | 4 |
| D-2025 | >0.5 | −2.5 |
| D-2026 | .022 | −35.1 |
| D-2027 | .00172 | −16.5 |
| D-2028 | >0.5 | 10 |
| D-2029 | .0106 | −56.2 |
| D-2032 | .00205 | −52.9 |
| D-2033 | .0107 | −61.7 |
| D-2034 | >0.5 | 6 |
| D-2035 | >0.5 | −3.8 |
| D-2036 | .00665 | −55.9 |
| D-2037 | >0.5 | 4 |
| D-2038 | >0.5 | 10 |
| D-2039 | .0116 | −23.9 |
| D-2040 | >0.5 | −25.4 |
| D-2041 | >0.5 | 9 |
| D-2042 | .00959 | −25.5 |
| D-2043 | >0.5 | 9 |
| D-2044 | .00552 | −29 |
| D-2045 | >0.5 | 9 |
| D-2046 | >0.5 | 9 |
| D-2047 | >0.5 | −5.9 |
| D-2048 | .00618 | −56.3 |
| D-2049 | >0.5 | 12 |
| D-2050 | >0.5 | 10 |
| D-2051 | >0.5 | −17.2 |
| D-2052 | >0.5 | −8.3 |
| D-2053 | >0.5 | 11 |
| D-2054 | >0.5 | −14.9 |
| D-2055 | >0.5 | −10.6 |
| D-2056 | >0.5 | 10 |
| D-2057 | .00485 | −59.2 |
| D-2058 | .014 | −53 |
| D-2059 | >0.5 | −4.9 |
| D-2060 | >0.5 | 18 |
| D-2061 | .00795 | −44.8 |
| D-2062 | .000668 | −74.6 |
| D-2063 | >0.5 | −21.8 |
| D-2064 | >0.5 | 9 |
| D-2065 | >0.5 | −10.5 |
| D-2066 | .0412 | −42.2 |
| D-2067 | >0.5 | 10 |

TABLE 4
RNA FISH assay on CHO transfected PNPLA3 I148M

| Duplex No. | IC50 (μM) | PNPLA3 knockdown (%) |
|---|---|---|
| D-2000 | .0316 | −29.2 |
| D-2001 | .0131 | −81.8 |
| D-2002 | .00216 | −90.5 |
| D-2003 | .022 | −50.4 |
| D-2004 | .00429 | −88 |
| D-2005 | >0.5 | 15 |
| D-2006 | .00301 | −89.2 |
| D-2007 | >0.5 | 6 |
| D-2009 | .00274 | −86.9 |
| D-2010 | .00203 | −93.3 |
| D-2011 | .000694 | −11.9 |
| D-2012 | >0.5 | −18 |
| D-2013 | .011 | −66.4 |
| D-2014 | .0057 | −84.3 |
| D-2015 | >0.5 | −13.5 |
| D-2016 | >0.5 | −12.4 |
| D-2017 | .00448 | −89.4 |
| D-2018 | .0104 | −36.2 |
| D-2019 | .0302 | −7.7 |
| D-2020 | .01 | −78.9 |
| D-2021 | .00435 | −83.5 |
| D-2022 | .00628 | −88.6 |
| D-2023 | .0143 | −44.3 |
| D-2024 | >0.5 | 11 |
| D-2025 | .00355 | −58.2 |
| D-2026 | .000867 | −39.4 |
| D-2027 | >0.5 | 32 |
| D-2028 | .00205 | −89.9 |
| D-2029 | .0019 | −94 |
| D-2030 | >0.5 | −9.4 |
| D-2031 | >0.5 | 4 |

[0193] RNA FISH was also run on a hepatic cell line containing the double mutant PNPLA3-rs738408-rs738409, as well as a control wild-type cell line, Hep3B. Hep3B and HepG2 cells (purchased from ATCC) were cultured in minimal essential medium (MEM from Corning for Hep3B and EMEM from ATCC for HepG2) supplemented with 10% fetal bovine serum (FBS, Sigma) and 1% penicillin-streptomycin (P-S, Corning). The siRNA transfection was performed as follows: 1 μl of test siRNAs and 4 μL of plain MEM or EMEM, depending on the cell line, were added to PDL-coated CellCarrier-384 Ultra assay plates (PerkinElmer) by BioMek FX (Beckman Coulter). 5 μL of Lipofectamine RNAiMAX (Thermo Fisher Scientific), pre-diluted in plain MEM or EMEM (specifically 0.035 μL RNAIMAX in 5 μL MEM for Hep3B and 0.06 μL of RNAiMAX in 5 μL EMEM for HepG2), was then dispensed into the assay plates by Multidrop Combi Reagent Dispenser (Thermo Fisher Scientific). After 20 mins incubation of the siRNA/RNAIMAX mixture at room temperature (RT), 30 μL of either Hep3B or HepG2 cells (2000 cells per well) in MEM or EMEM supplemented with 10% FBS and 1% P-S were added to the transfection complex using Multidrop Combi Reagent Dispenser. The assay plates were incubated for 20 mins at RT prior to being placed in an incubator. Cells were then incubated for 72 hrs at 37° C. and 5% CO2. ViewRNA ISH Cell Assay was performed following manufacture's protocol (Thermo Fisher Scientific) using an in-house assembled automated FISH assay platform for liquid handling. In brief, cells were fixed in 4% formaldehyde (Thermo Fisher Scientific) for 15 mins at RT, permeabilized with detergent for 3 mins at RT and then treated with protease solution for 10 mins at RT. Incubation of target-specific probe pairs (Thermo Fisher Scientific) was done for 3 hrs, while for Preamplifiers, Amplifiers and Label Probes (Thermo Fisher Scientific) were for 1 hr each. All hybridization steps were carried out at 40° C. in Cytomat 2C-LIN automated incubator (Thermo Fisher Scientific). After hybridization reactions, cells were stained for 30 mins with Hoechst and CellMask Blue (Thermo Fisher Scientific) and then imaged on Opera Phenix (PerkinElmer). The images were analyzed using Columbus Image Data Storage and Analysis System (PerkinElmer) to obtain mean spot counts per cell. The spot counts were normalized using the high (containing phosphate-buffered saline, Corning) and low (without target probe pairs) control wells. The normalized values against the total siRNA concentrations were plotted and the data were fit to a four-parameter sigmoidal model in Genedata Screener (Genedata) to obtain IC50 and maximum activity. The results of the assay for HepG2 cells is shown in Table 5 and the results of the assay for Hep3B cells is shown in Table 6. PNPLA3 knockdown provides a percentage of knockdown compared to control. Negative values indicate a decrease in PNPLA3 levels. In instances where a duplex was run more than once, the average IC50 is shown, with a standard deviation.

TABLE 5
RNA FISH assay on hepatic HepG2 cells

| Duplex No. | IC50 (μM) | PNPLA3 knockdown (%) |
|---|---|---|
| D-2001 | .0132 | −70.5 |
| D-2003 | .0458 | −46.9 |
| D-2004 | .0049 | −74.2 |
| D-2006 | .00283 | −69.6 |
| D-2009 | .00448 | −62.2 |
| D-2010 | .00206 | −52 |
| D-2013 | .00319 | −71.7 |
| D-2014 | .00164 | −67.4 |
| D-2017 | .00222 | −60.9 |
| D-2018 | .00717 | −52.7 |
| D-2020 | .00664 | −68.3 |
| D-2021 | .00559 | −61.5 |
| D-2022 | .004 | −30.5 |
| D-2023 | >0.5 | −18 |
| D-2025 | .0041 | −61.9 |
| D-2026 | .00937 | −34.6 |
| D-2043 | >0.1 | −5.394 |
| D-2045 | >0.1 | −37.195 |
| D-2046 | >0.1 | 0.94 |
| D-2047 | >0.1 | −11.446 |
| D-2048 | 0.000355 | −56.824 |
| D-2049 | Undefined | −30.881 |
| D-2050 | >0.1 | −11.814 |
| D-2051 | 0.000903 | −73.749 |
| D-2052 | 0.000235 | −38.467 |
| D-2053 | 0.000142 | −19.405 |
| D-2054 | >0.1 | −29.069 |
| D-2055 | >0.1 | −31.986 |
| D-2056 | Undefined | −38.596 |
| D-2057 | 0.000197 | −87.199 |
| D-2058 | 0.00126 | −40.177 |
| D-2059 | >0.1 | −11.162 |
| D-2060 | >0.1 | −8.147 |
| D-2069 | 0.0329 | −62.804 |
| D-2072 | 0.00377 | −47.552 |
| D-2078 | >0.1 | −25.077 |
| D-2073 | 0.00602 | −54.092 |
| D-2084 | 0.000549 | −45.854 |
| D-2084 | 0.0018 | −60.106 |
| D-2085 | 0.000122 | −38.539 |
| D-2085 | 0.0076 | −68.83 |
| D-2086 | 0.00182 | −25.524 |
| D-2087 | 0.00103 | −53.242 |
| D-2088 | 0.00111 | −26.614 |
| D-2089 | 0.000776 | −55.436 |
| D-2089 | 0.000457 +/− 0.000174 | −62.57 +/− 1.46 |
| D-2090 | Undefined | −56.094 |
| D-2092 | 0.000979 | −52.168 |
| D-2099 | 0.000727 | −43.233 |
| D-2100 | 0.000152 | −40.651 |
| D-2104 | 0.000712 | −72.734 |
| D-2105 | 0.000129 | −75.994 |
| D-2128 | 0.00154 | −60.927 |
| D-2138 | 0.0142 | −63.864 |
| D-2149 | 0.000518 | −74.288 |
| D-2152 | 0.00524 | −64.758 |
| D-2153 | 0.00149 | −72.861 |
| D-2155 | >0.1 | −32.937 |
| D-2156 | 0.0183 | −75.145 |
| D-2157 | >0.0333 | −37.881 |
| D-2158 | 0.00368 | −79.231 |
| D-2159 | 0.00167 | −85.848 |
| D-2160 | 0.00442 | −37.827 |
| D-2172 | 0.0000615 | −74.462 |
| D-2182 | 0.000211 | −79.605 |
| D-2183 | 0.000159 | −80.865 |
| D-2187 | 0.00109 | −67.777 |
| D-2188 | 0.000728 | −71.503 |
| D-2189 | 0.000224 | −58.772 |
| D-2190 | 0.000803 | −72.508 |
| D-2192 | 0.00125 | −33.021 |
| D-2193 | 0.000152 | −74.239 |
| D-2194 | 0.00385 | −50.848 |
| D-2196 | 0.000362 | −70.158 |
| D-2197 | 0.000180 | −54.44 |
| D-2198 | 0.000269 | −45.556 |
| D-2199 | 0.000198 | −81.082 |
| D-2201 | 0.000356 | −82.2 |
| D-2202 | 0.000123 | −62.466 |
| D-2203 | 0.00476 | −68.112 |
| D-2204 | 0.000300 | −63.383 |
| D-2205 | 0.000442 | −70.712 |
| D-2206 | 0.000969 | −74.194 |
| D-2208 | 0.000202 | −64.046 |
| D-2209 | 0.000752 | −63.083 |
| D-2210 | 0.0000991 | −60.426 |
| D-2211 | 0.0000948 | −71.098 |
| D-2213 | 0.00119 | −65.57 |
| D-2214 | 0.000293 | −72.959 |
| D-2215 | 0.000307 | −64.561 |
| D-2217 | 0.00198 | −87.273 |
| D-2218 | 0.000186 | −64.522 |
| D-2219 | 0.000577 | −74.879 |
| D-2220 | 0.000189 | −74.278 |
| D-2221 | 0.000173 | −54.639 |
| D-2223 | 0.00131 | −69.834 |
| D-2224 | 0.000527 | −84.911 |
| D-2225 | 0.000561 | −68.969 |
| D-2226 | 0.00109 | −75.536 |
| D-2227 | 0.000227 | −85.915 |
| D-2228 | 0.00202 | −50.227 |
| D-2229 | Undefined | −59.847 |
| D-2230 | 0.000156 | −53.194 |
| D-2231 | 0.000351 | −65.054 |
| D-2232 | 0.0000619 | −63.991 |
| D-2233 | 0.0000982 | −74.304 |
| D-2234 | 0.000290 | −81.992 |
| D-2235 | 0.000127 | −83.593 |
| D-2236 | 0.000243 | −80.826 |
| D-2237 | 0.0000711 | −62.814 |
| D-2238 | 0.0000690 | −76.476 |
| D-2239 | 0.000123 | −74.747 |
| D-2240 | 0.000120 | −79.301 |
| D-2241 | 0.000201 | −88.769 |
| D-2242 | 0.000179 | −84.503 |
| D-2243 | 0.000264 | −88.712 |
| D-2244 | 0.0000605 | −82.556 |
| D-2245 | 0.000125 | −83.93 |
| D-2246 | 0.000122 | −84.41 |
| D-2247 | 0.000100 | −81.777 |
| D-2248 | 0.000141 | −79.18 |
| D-2249 | 0.0000710 | −85.093 |
| D-2250 | 0.000494 | −81.724 |
| D-2251 | 0.000196 | −87.601 |
| D-2252 | 0.0000796 | −62.87 |
| D-2253 | 0.000501 | −78.699 |
| D-2254 | 0.0000979 | −67.617 |
| D-2255 | 0.000359 | −81.18 |
| D-2256 | 0.000610 | −98.206 |
| D-2257 | 0.000151 | −76.718 |
| D-2258 | 0.000325 | −87.548 |
| D-2259 | 0.000124 | −82.545 |
| D-2260 | 0.000109 | −85.47 |
| D-2261 | 0.000231 | −75.386 |
| D-2262 | 0.000162 | −72.407 |
| D-2263 | 0.000271 | −74.968 |
| D-2264 | 0.000132 | −76.418 |
| D-2265 | >0.1 | −17.144 |
| D-2266 | Undefined | −58.475 |
| D-2267 | >0.1 | −3.991 |
| D-2280 | 0.0000390 | −85.368 |
| D-2286 | 0.00304 | −89.536 |
| D-2287 | 0.00142 | −85.435 |
| D-2287 | 0.000261 | −66.501 |
| D-2288 | 0.000839 | −81.988 |
| D-2289 | 0.0012 | −83.437 |
| D-2289 | 0.00168 | −69.471 |
| D-2290 | 0.00157 | −73.089 |
| D-2291 | 0.0112 | −64.108 |
| D-2292 | 0.00411 | −66.681 |
| D-2292 | 0.00138 | −56.253 |
| D-2293 | 0.00112 | −61.118 |
| D-2294 | 0.000408 | −70.684 |
| D-2295 | 0.000195 | −65.493 |
| D-2297 | 0.00165 | −61.821 |
| D-2297 | 0.000684 | −69.444 |
| D-2318 | 0.000986 | −69.28 |
| D-2319 | 0.00136 | −67.654 |
| D-2320 | 0.00129 | −83.723 |
| D-2323 | 0.00194 | −74.525 |
| D-2324 | 0.00209 | −63.745 |
| D-2325 | 0.000301 | −81.302 |
| D-2327 | 0.000306 | −77.959 |
| D-2327 | 0.000610 | −56.293 |
| D-2328 | 0.000131 | −72.631 |
| D-2345 | 0.000131 | −72.677 |
| D-2346 | 0.0000274 | −71.459 |
| D-2347 | 0.000640 | −78.414 |
| D-2348 | 0.000101 | −64.627 |
| D-2349 | 0.000487 | −52.131 |
| D-2350 | 0.000102 | −68.668 |
| D-2351 | Undefined | −70.229 |
| D-2352 | 0.000332 | −81.083 |
| D-2352 | 0.0027713 +/− 0.00426 | −68.138 +/− 9.28 |
| D-2353 | 0.000410 | −83.001 |
| D-2353 | 0.00215 | −64.343 |
| D-2354 | 0.003405 +/− 0.00185 | −72.56 +/− 7.42 |
| D-2354 | 0.000362 | −72.776 |
| D-2355 | 0.00215 | −69.321 |
| D-2358 | 0.0011 | −61.081 |
| D-2359 | 0.000654 | −76.258 |
| D-2360 | Undefined | −59.027 |
| D-2361 | 0.00414 | −57.88 |
| D-2362 | 0.000772 | −87.512 |
| D-2364 | 0.00104 | −53.895 |
| D-2370 | 0.0024 | −83.423 |
| D-2371 | 0.00418 | −72.262 |
| D-2372 | 0.00492 | −67.648 |
| D-2373 | 0.000906 | −64.099 |
| D-2374 | 0.00282 | −64.049 |
| D-2375 | 0.00125 | −59.813 |
| D-2376 | 0.00171 | −63.025 |
| D-2377 | 0.00168 | −61.597 |
| D-2378 | 0.00505 | −72.446 |
| D-2379 | 0.00511 | −80.576 |
| D-2380 | 0.0497 | −82.835 |
| D-2381 | 0.000944 | −71.788 |
| D-2382 | 0.000830 | −65.087 |
| D-2383 | 0.00118 | −71.393 |
| D-2386 | 0.0000367 | −44.073 |
| D-2387 | 0.00224 | −74.24 |
| D-2390 | 0.00188 | −69.313 |
| D-2391 | 0.000493 | −72.314 |
| D-2393 | 0.008875 +/− 0.0112 | −48.855 +/− 15.6 |
| D-2401 | 0.000125 | −69.217 |
| D-2409 | 0.00479 | −68.703 |
| D-2402 | >0.5 | 21.01 +/− 6.08 |
| D-2410 | 0.00533 | −64.812 |
| D-2411 | 0.00283 | −64.889 |
| D-2412 | 0.00211 | −67.781 |
| D-2413 | 0.006575 +/− 0.0000212 | −64.021 +/− 15.8 |
| D-2417 | 0.00558 | −50.293 |
| D-2418 | 0.00566 | −59.533 |
| D-2419 | >0.5 | −15.364 +/− 7.56 |
| D-2423 | 0.000498 +/− 0.000414 | −65.15 +/− 17.5 |
| D-2426 | >0.1 | −15.207 |
| D-2430 | 0.0000511 | −63.602 |
| D-2444 | 0.000262 +/− 0.000192 | −67.206 +/− 9.13 |
| D-2454 | 0.001795 +/− 0.000106 | −51.619 +/− 0.163 |
| D-2456 | 0.000274 | −61.291 |
| D-2472 | 0.000314 | −70.624 |
| D-2473 | >0.1 | −19.624 +/− 7.27 |
| D-2474 | 0.000339 | −37.846 |
| D-2475 | 0.002249 +/− 0.00231 | −41.661 +/− 8.64 |
| D-2476 | 0.000594 | −26.48 |
| D-2477 | 0.000547 | −61.592 |
| D-2478 | 0.000168 | −65.904 |
| D-2479 | 0.0005565 | −65.14 |
| D-2480 | 0.000907 | −53.271 |
| D-2481 | 0.0004005 | −59.5 |
| D-2482 | 0.000493 | −61.712 |
| D-2483 | 0.0004015 +/− 0.000218 | −66.803 +/− .197 |
| D-2484 | 0.0003375 | −67.4 |
| D-2485 | 0.0002865 | −44.529 |
| D-2486 | 0.0012575 | −62.847 |
| D-2487 | 0.000454 | −54.396 |
| D-2488 | 0.0002415 | −66.315 |
| D-2489 | >0.5 | −2.973 +/− 1.98 |
| D-2490 | 0.0011555 | −62.566 |
| D-2491 | 0.0006005 | −60.304 |
| D-2492 | 0.0007775 | −47.748 |
| D-2493 | 0.001465 | −48.8 |
| D-2494 | 0.0008985 | −50.707 |
| D-2495 | 0.001317 | −55.5 |
| D-2496 | 0.0001374 | −68.949 |
| D-2497 | 0.00013615 +/− 0.0000691 | −72.763 +/− 4.02 |
| D-2498 | 0.000332 +/− 0.000259 | −82.507 +/− 6.15 |
| D-2499 | 0.0004155 | −75.4 |
| D-2500 | 0.0000742 +/− 0.0000407 | −74.968 +/− 5.41 |
| D-2501 | >0.5 | −1.648 +/− 2.2 |
| D-2502 | 0.0002705 +/− 0.000252 | −68.406 +/− 5.36 |
| D-2503 | 0.000313 +/− 0.000198 | −67.858 +/− 8.2 |
| D-2504 | 0.0006445 +/− 0.000385 | −59.733 +/− 7.96 |
| D-2505 | 0.0004985 | −53.3 |
| D-2506 | >0.1 | −16.588 +/− 14.9 |
| D-2507 | 0.002136 | −64.978 |
| D-2508 | >0.1 | −20.61 +/− 11.1 |
| D-2509 | 0.001242 | −65.112 |
| D-2510 | 0.0015895 | −56.416 |
| D-2511 | 0.00166 | −19.901 |
| D-2512 | 0.000593 | −0.374 |
| D-2513 | 0.0001497 +/− 0.000123 | −69.663 +/− 11.6 |
| D-2514 | 0.000204 +/− 0.0000594 | −69.924 +/− 13.7 |
| D-2515 | 0.000331 +/− 0.000129 | −71.29 +/− 8.74 |
| D-2516 | 0.000348 +/− 0.000249 | −65.905 +/− 14.8 |
| D-2517 | 0.000452 +/− 0.000322 | −68.212 +/− 11.2 |
| D-2518 | 0.0006965 | −73.226 |
| D-2519 | >0.5 | −1.486 +/− 4.67 |
| D-2520 | 0.000098 | −75.127 |
| D-2521 | 0.000717 +/− 0.000378 | −61.216 +/− 12.8 |
| D-2522 | 0.000661 +/− 0.000748 | −56.771 +/− 16.9 |
| D-2523 | 0.0003685 | −73.312 |
| D-2524 | 0.0002745 +/− 0.0000686 | −65.341 +/− 12.7 |
| D-2525 | 0.003855 +/− 0.0033 | −44.288 +/− 19.0 |
| D-2526 | 0.0006115 +/− 0.000204 | −57.77 +/− 13.2 |
| D-2527 | 0.000333 | −77.405 |
| D-2528 | 0.0002665 +/− 0.000105 | −62.407 +/− 8.65 |
| D-2529 | 0.0076967 +/− 0.00555 | −44.194 +/− 6.73 |
| D-2530 | 0.0132 | −42.657 +/− 0.222 |
| D-2531 | 0.00312 | −32.789 +/− 12.0 |
| D-2532 | 0.005795 +/− 0.00268 | −44.051 +/− 2.82 |
| D-2533 | 0.005515 +/− 0.00356 | −43.145 |
| D-2534 | 0.0129 | −28.734 +/− 16.4 |
| D-2535 | 0.003195 +/− 0.000233 | −29.79 |
| D-2536 | 0.005865 +/− 0.00456 | −25.918 |
| D-2537 | 0.0133 | −25.755 +/− 3.32 |
| D-2538 | >0.1 | −40.955 +/− 5.3 |
| D-2539 | 0.004785 +/− 0.00183 | −34.334 +/− 11.0 |
| D-2540 | 0.0044 +/− 0.00075 | −39.221 |
| D-2541 | 0.002735 +/− 0.00141 | −62.39 +/− 3.03 |
| D-2542 | 0.01323 +/− 0.0108 | −30.917 +/− 1.57 |
| D-2543 | >0.1 | −8.54 +/− 8.37 |
| D-2544 | 0.017 | −23.757 +/− 2.2 |
| D-2545 | 0.01642 +/− 0.0164 | −52.394 +/− 7.21 |
| D-2546 | >0.1 | −25.351 +/− 7.84 |
| D-2547 | 0.00412 | −25.042 +/− 5.28 |
| D-2548 | 0.00411 +/− 0.00184 | −40.406 +/− 1.26 |
| D-2549 | 0.02285 +/− 0.00318 | −53.713 +/− 14.1 |
| D-2550 | 0.015935 +/− 0.0115 | −41.907 |
| D-2551 | 0.00795 | −26.39 |
| D-2552 | 0.01165 +/− 0.00841 | −41.306 |
| D-2553 | 0.00361 | −70.457 |
| D-2554 | 0.00656 | −42.866 |
| D-2555 | >0.1 | −11.425 |
| D-2556 | 0.00336 | −63.996 |
| D-2557 | >0.1 | −2.734 |
| D-2558 | 0.00251 | −66.775 |
| D-2559 | >0.1 | −7.034 |
| D-2560 | 0.0234 | −44.657 |
| D-2561 | 0.00154 | −74.225 |
| D-2562 | 0.00454 | −66.578 |
| D-2563 | 0.00182 | −77.025 |
| D-2564 | 0.009 | −64.021 |
| D-2565 | 0.00609 | −70.965 |
| D-2566 | 0.00255 | −52.65 |
| D-2567 | 0.00584 | −56.603 |
| D-2568 | 0.0157 | −63.002 |
| D-2569 | 0.00327 | −64.898 |
| D-2570 | 0.00144 | −55.424 |
| D-2571 | >0.1 | −18.661 |
| D-2572 | 0.00557 | −25.668 |
| D-2573 | 0.0115 | −55.329 |
| D-2574 | 0.00289 | −69.84 |
| D-2575 | 0.00378 | −69.491 |
| D-2576 | 0.00527 | −64.841 |
| D-2577 | 0.00511 | −46.449 |
| D-2578 | 0.0026 | −67.821 |
| D-2579 | 0.00402 | −67.057 |
| D-2580 | 0.00119 | −64.422 |
| D-2581 | 0.00915 | −73.008 |
| D-2582 | 0.000823 | −77.053 |
| D-2583 | 0.00851 | −66.555 |
| D-2584 | 0.00513 | −54.442 |
| D-2585 | 0.0154 | −67.707 |
| D-2586 | 0.00701 | −69.624 |
| D-2587 | 0.00732 | −66.627 |
| D-2588 | 0.00226 | −70.854 |
| D-2589 | 0.00837 | −31.221 |
| D-2590 | 0.0249 | −41.857 |
| D-2591 | 0.009 | −64.021 |
| D-2592 | 0.00609 | −70.965 |
| D-2593 | 0.00255 | −52.65 |
| D-2594 | 0.00584 | −56.603 |
| D-2595 | 0.0157 | −63.002 |
| D-2596 | 0.00327 | −64.898 |
| D-2597 | 0.00144 | −55.424 |
| D-2598 | >0.1 | −18.661 |
| D-2599 | 0.00557 | −25.668 |
| D-2600 | 0.0115 | −55.329 |
| D-2601 | 0.00289 | −69.84 |
| D-2602 | 0.00378 | −69.491 |
| D-2603 | 0.00527 | −64.841 |
| D-2604 | 0.00511 | −46.449 |
| D-2605 | 0.0026 | −67.821 |
| D-2606 | 0.00402 | −67.057 |
| D-2607 | 0.00119 | −64.422 |
| D-2608 | 0.00915 | −73.008 |
| D-2609 | 0.000823 | −77.053 |
| D-2610 | 0.00141 | −37.663 +/− 39.4 |
| D-2611 | >0.1 | −2.829 +/− 0.006 |
| D-2612 | >0.1 | −15.894 |
| D-2613 | 0.00809 | −58.833 |
| D-2614 | 0.00204 | −73.042 |
| D-2615 | 0.00306 | −70.087 |
| D-2616 | 7.95E−04 | −71.014 |
| D-2617 | 0.00218 | −75.769 |
| D-2618 | 0.0429 | −31.19 +/− 2.61 |
| D-2619 | 0.02495 +/− 0.0192 | −59.645 +/− 13.4 |
| D-2620 | 0.0055 +/− 0.00329 | −73.308 +/− 5.33 |
| D-2621 | 0.004705 +/− 0.00176 | −63.053 +/− 7.66 |
| D-2622 | 0.004525 +/− 0.00231 | −66.895 +/− 7.78 |
| D-2623 | 0.00435 | −31.366 +/− 14.5 |
| D-2624 | 0.0056 +/− 0.0016 | −65.16 +/− 10.9 |
| D-2625 | 0.00764 +/− 0.00115 | −73.065 +/− 9.97 |
| D-2626 | 0.021645 +/− 0.0267 | −71.117 +/− 3.63 |
| D-2627 | 0.00651 +/− 0.00489 | −63.009 +/− 8.83 |
| D-2628 | 0.01334 +/− 0.00588 | −48.771 +/− 2.35 |
| D-2629 | 0.005504 +/− 0.00434 | −74.111 +/− 4.61 |
| D-2630 | 0.007965 +/− 0.00684 | −70.17 +/− 5.32 |
| D-2631 | >0.1 | −8.645 |
| D-2632 | >0.1 | −37.841 |
| D-2633 | 0.0111 | −53.354 |
| D-2634 | 0.0187 | −63.686 |
| D-2635 | 0.00797 | −58.605 |
| D-2636 | >0.1 | −34.727 |
| D-2637 | 0.00541 | −61.225 |
| D-2638 | 0.00397 | −62.221 |
| D-2639 | 0.0295 +/− 0.0187 | −51.328 +/− 12.8 |
| D-2640 | 0.0212 | −37.799 +/− 16.1 |
| D-2641 | 0.00164 | −21.913 +/− 14.1 |
| D-2642 | >0.1 | −11.733 +/− 23.5 |
| D-2643 | >0.1 | −23.009 |
| D-2644 | 0.00165 | −46.514 |
| D-2645 | 0.00242 | −75.956 |
| D-2646 | >0.1 | −15.539 +/− 1.03 |
| D-2647 | 0.00243 | −73.363 |
| D-2648 | 0.00117 +/− 0.0000849 | −74.63 +/− 1.55 |
| D-2649 | 0.007455 +/− 0.00756 | −46.662 +/− 2.86 |
| D-2650 | 0.003845 +/− 0.00122 | −67.914 +/− 1.87 |
| D-2651 | 0.000449 | −70.274 |
| D-2652 | 0.0014 | −66.6 |
| D-2653 | 0.00299 | −59.695 |
| D-2654 | 0.00431 | −26.338 +/− 4.54 |
| D-2655 | 0.00254 +/− 0.0012 | −52.632 +/− 0.938 |
| D-2656 | 0.003275 +/− 0.00112 | −37.351 +/− 0.79 |
| D-2657 | 0.007435 +/− 0.00357 | −37.313 +/− 3.03 |
| D-2658 | >0.1 | −22.486 +/− 10.6 |
| D-2659 | >0.1 | −10.905 +/− 3.7 |
| D-2660 | >0.1 | −4.489 +/− 8.45 |
| D-2661 | 0.00875 +/− 0.00728 | −56.877 +/− 9.41 |
| D-2662 | >0.1 | −8.133 |
| D-2663 | 0.00268 +/− 0.000778 | −73.024 +/− 1.16 |
| D-2664 | 0.008 | −30.908 +/− 1.19 |
| D-2665 | 0.004675 +/− 0.000516 | −39.914 +/− 3.72 |
| D-2666 | 0.004085 +/− 0.000106 | −46.423 +/− 3.66 |
| D-2667 | 0.017107 +/− 0.0145 | −72.967 +/− 2.96 |
| D-2668 | 0.00589 +/− 0.000919 | −73.779 +/− 2.9 |
| D-2669 | 0.0035033 +/− 0.00167 | −67.153 +/− 0.761 |
| D-2670 | 0.0129 | −59.149 +/− 0.371 |
| D-2671 | 0.0157 +/− 0.00156 | −57.5 +/− 3.88 |
| D-2672 | >0.1 | −3.262 +/− 6.36 |
| D-2673 | 0.00461 +/− 0.00173 | −50.295 +/− 14.1 |
| D-2674 | 0.00279 | −54.886 +/− 32.2 |
| D-2675 | >0.1 | −13.5 +/− 21.4 |
| D-2676 | 0.015075 +/− 0.0156 | −50.255 +/− 8.86 |
| D-2677 | >0.1 | −22.123 |
| D-2678 | >0.1 | −43.995 |
| D-2679 | 0.00268 | −83.804 |
| D-2680 | >0.1 | −47.702 |
| D-2681 | >0.1 | −38.246 |
| D-2682 | 0.00305 +/− 0.000255 | −70.849 +/− 11.3 |
| D-2683 | 0.00363 | −59.037 +/− 15.6 |
| D-2684 | 0.00763 | −74.35 |
| D-2685 | 0.00585 +/− 0.00379 | −72.725 +/− 18.8 |
| D-2686 | >0.1 | −6.429 |
| D-2687 | 0.0031933 +/− 0.000225 | −70.122 +/− 5.47 |
| D-2688 | 0.0023063 +/− 0.00152 | −65.267 +/− 8.73 |
| D-2689 | 0.0025767 +/− 0.000721 | −66.016 +/− 11.4 |
| D-2690 | 0.0032367 +/− 0.00272 | −63.04 +/− 13.4 |
| D-2691 | >0.1 | −63.208 |
| D-2692 | 0.00376 | −62.833 |
| D-2693 | 0.002915 +/− 0.00131 | −71.229 +/− 10.9 |
| D-2694 | 0.003245 +/− 0.000573 | −69.264 |
| D-2695 | 0.01652 +/− 0.0179 | −51.139 +/− 17.8 |
| D-2696 | 0.0024 | 12.88 |
| D-2697 | 0.013 | −63.845 |
| D-2698 | 0.003285 +/− 0.000304 | −79.24 |
| D-2699 | 0.002205 +/− 0.00117 | −67.306 +/− 0.216 |
| D-2700 | 0.0022297 +/− 0.00129 | −67.949 +/− 7.66 |
| D-2701 | 0.0026037 +/− 0.00196 | −54.669 +/− 7.49 |
| D-2702 | 0.00448 | −64.496 |
| D-2703 | 0.00254 | −65.869 |
| D-2704 | 0.00257 | −71.285 |
| D-2705 | 0.002505 +/− 0.000346 | −64.722 +/− 4.62 |
| D-2706 | 0.003865 +/− 0.00264 | −63.247 +/− 10.0 |
| D-2707 | 0.003425 +/− 0.000318 | −65.82 +/− 2.07 |
| D-2708 | 0.0055112 +/− 0.00582 | −66.395 +/− 10.4 |
| D-2709 | 0.00243 | −76.778 |
| D-2710 | 0.000912 | −78.289 |
| D-2711 | >0.1 | 4.37 +/− 9.89 |
| D-2712 | 0.0046104 +/− 0.00608 | −65.876 +/− 9.59 |
| D-2713 | 0.0010115 +/− 0.00102 | −67.741 +/− 2.46 |
| D-2714 | 0.0063585 +/− 0.00869 | −66.904 +/− 0.044 |
| D-2715 | 0.0061022 +/− 0.00862 | −74.054 |
| D-2716 | 0.00338 +/− 0.00308 | −70.054 +/− 9.47 |
| D-2717 | 0.0033 +/− 0.00155 | −72.932 +/− 7.6 |
| D-2718 | 0.0155 | −58.784 |
| D-2719 | 0.00527 | −57.281 |
| D-2720 | 0.0215 | −41.76 |
| D-2721 | 0.01829 +/− 0.0132 | −64.649 +/− 3.84 |
| D-2722 | 0.0164 | −53.261 |
| D-2723 | 0.00733 | −47.56 |
| D-2724 | 0.00564 | −37.19 |
| D-2725 | 0.00776 | −42.77 |
| D-2726 | 0.00675 | −42.811 |
| D-2727 | 0.00667 | −57.414 |
| D-2728 | 0.0438 | −37.169 |
| D-2729 | 0.00454 | −25.538 |
| D-2730 | 0.0241 | −47.501 |
| D-2731 | 0.0088 | −44.866 |
| D-2732 | 0.0326 | −44.68 |
| D-2733 | 0.0217 | −25.146 |
| D-2734 | >0.1 | −14.582 |
| D-2735 | 0.0202 | −28.294 |
| D-2736 | 0.014 | −38.251 |
| D-2737 | >0.1 | −17.833 |
| D-2738 | 0.00514 | −62.424 |
| D-2739 | 0.0317 | −41.409 |
| D-2740 | 0.0111 | −59.253 |
| D-2741 | 0.0111 | −59.687 |
| D-2742 | 0.0229 | −82.351 |
| D-2743 | 0.00933 | −59.271 |
| D-2744 | 0.0215 | −54.24 |
| D-2745 | 0.00619 | −57.406 |
| D-2746 | 0.00654 | −69.738 |
| D-2747 | 0.0307 | −63.431 |
| D-2748 | 0.0152 | −59.477 |
| D-2749 | 0.0329 | −45.543 |
| D-2750 | 0.0149 | −47.589 |
| D-2751 | 0.0261 | −54.747 |
| D-2752 | 0.0106 | −65.912 |
| D-2753 | 0.0113 | −66.051 |
| D-2754 | 0.0201 | −65.582 |
| D-2755 | >0.1 | −25.144 |
| D-2756 | 0.0179 | −65.965 |
| D-2757 | 0.0251 | −40.795 |
| D-2758 | 0.0312 | −40.55 |
| D-2759 | 0.00936 | −63.545 |
| D-2760 | 0.00859 | −74.99 |
| D-2761 | 0.0115 | −71.716 |
| D-2762 | 0.00777 | −68.169 |
| D-2763 | 0.0106 | −72.426 |
| D-2764 | 0.0327 | −58.009 |
| D-2766 | 0.003215 +/− 0.000516 | −77.976 |
| D-2767 | 0.00376 +/− 0.000552 | −74.346 |
| D-2768 | 0.00396 +/− 0.0000566 | −76.319 |
| D-2769 | 0.005655 +/− 0.00165 | −72.844 +/− 3.26 |
| D-2770 | 0.0041 +/− 0.000778 | −79.301 +/− 1.36 |
| D-2771 | 0.00891 +/− 0.00137 | −70.223 |
| D-2772 | 0.004855 +/− 0.00000707 | −72.651 |
| D-2773 | 0.004115 +/− 0.000544 | −77.716 +/− 5.2 |
| D-2774 | 0.00467 +/− 0.000354 | −76.397 +/− 3.67 |

TABLE 6
RNA FISH assay on hepatic Hep3B cells

| Duplex No. | IC50 (μM) | PNPLA3 knockdown (%) |
|---|---|---|
| D-2001 | .00842 | −37 |
| D-2003 | .0158 | −32.1 |
| D-2004 | .00266 | −32.4 |
| D-2006 | .00948 | −54.1 |
| D-2009 | .00228 | −29.5 |
| D-2010 | .00219 | −37.2 |
| D-2013 | .00524 | −31.5 |
| D-2014 | .00148 | −37.6 |
| D-2017 | .00333 | −37.6 |
| D-2018 | .00315 | −21.3 |
| D-2020 | >0.5 | 6 |
| D-2021 | >0.5 | −1.6 |
| D-2022 | .00272 | −30.9 |
| D-2023 | >0.5 | 24 |
| D-2025 | .0101 | −30.3 |
| D-2026 | .00551 | −23 |
| D-2413 | | −45.832 |
| D-2419 | >0.5 | −4.545 |
| D-2426 | >0.1 | −15.207 |
| D-2454 | 0.00187 | −51.735 |
| D-2473 | >0.1 | −21.333 |
| D-2522 | 0.00504 | −43.036 |
| D-2523 | 0.0122 | −52.084 |
| D-2564 | 0.01 | −63.199 |
| D-2565 | 0.00938 | −58.392 |
| D-2566 | 0.00343 | −61.484 |
| D-2567 | 0.0175 | −53.489 |
| D-2568 | >0.1 | −18.367 |
| D-2569 | 0.0195 | −62.568 |
| D-2570 | 0.0127 | −77.141 |
| D-2571 | >0.1 | −15.922 |
| D-2572 | >0.1 | −12.434 |
| D-2573 | >0.1 | −14.649 |
| D-2574 | 0.0215 | −52.515 |
| D-2575 | 0.0203 | −53.175 |
| D-2576 | 0.018 | −48.137 |
| D-2577 | >0.1 | −16.105 |
| D-2578 | >0.1 | −21.309 |
| D-2579 | >0.1 | −17.510 |
| D-2580 | >0.1 | −24.616 |
| D-2581 | >0.1 | −13.987 |
| D-2582 | 0.0574 | −30.543 |
| D-2583 | >0.1 | −23.990 |
| D-2584 | >0.1 | −6.715 |
| D-2585 | >0.1 | −17.518 |
| D-2586 | >0.1 | −24.518 |
| D-2587 | 0.0391 | −58.478 |
| D-2588 | 0.0218 | −56.609 |
| D-2589 | >0.1 | −17.418 |
| D-2590 | >0.1 | −21.161 |
| D-2591 | 0.0167 | −59.366 |
| D-2592 | 0.0104 | −61.548 |
| D-2593 | Undefined | −61.879 |
| D-2594 | 0.0211 | −43.856 |
| D-2595 | 0.0272 | −63.020 |
| D-2596 | >0.1 | −10.278 |
| D-2597 | 0.0546 | −31.743 |
| D-2598 | Undefined | −47.517 |
| D-2599 | 0.00489 | −70.825 |
| D-2600 | >0.1 | −8.522 |
| D-2601 | 0.0364 | −31.836 |
| D-2602 | 0.00577 | −65.062 |
| D-2603 | 0.01 | −58.287 |
| D-2604 | 0.00353 | −40.649 |
| D-2605 | 0.0113 | −50.691 |
| D-2606 | >0.1 | −5.097 |
| D-2607 | 0.0261 | −49.898 |
| D-2608 | >0.1 | −23.747 |
| D-2609 | >0.1 | −23.804 |
| D-2620 | >0.5 | −21.969 |
| D-2637 | >0.1 | −12.63 |
| D-2638 | >0.1 | −16.25 |
| D-2639 | >0.1 | −22.905 |
| D-2640 | >0.1 | −14.572 |
| D-2666 | >0.5 | −14.898 |
| D-2667 | >0.5 | −14.537 |
| D-2668 | >0.5 | −18.779 |
| D-2669 | >0.5 | −8.624 |
| D-2670 | >0.5 | −16.641 |
| D-2671 | >0.5 | −8.665 |
| D-2672 | >0.5 | 4.92 |
| D-2673 | >0.5 | −8.024 |
| D-2675 | >0.5 | −17.999 |
| D-2676 | >0.5 | −22.989 |
| D-2677 | >0.5 | −11.245 |
| D-2678 | >0.5 | −10.209 |
| D-2679 | | −46.578 |
| D-2680 | >0.5 | −12.289 |
| D-2681 | >0.5 | −9.564 |
| D-2682 | 0.184 | −57.848 |
| D-2683 | >0.5 | −19.024 |
| D-2684 | >0.5 | −5.026 |
| D-2685 | 0.0395 | −34.673 |
| D-2686 | >0.5 | −12.298 |
| D-2687 | >0.5 | −7.153 |
| D-2688 | >0.5 | −12.895 |
| D-2689 | >0.5 | −20.429 |
| D-2690 | >0.5 | −8.608 |
| D-2691 | >0.5 | −7.608 |
| D-2692 | >0.5 | −7.763 |
| D-2693 | >0.5 | −12.294 |
| D-2694 | >0.5 | −10.718 |
| D-2695 | | −25.618 |
| D-2696 | >0.5 | −7.666 |
| D-2697 | >0.5 | −11.529 |
| D-2698 | >0.5 | −11.875 |
| D-2699 | >0.5 | −4.132 |
| D-2700 | | −34.399 |
| D-2701 | >0.5 | −4.434 |
| D-2702 | >0.5 | −9.919 |
| D-2703 | >0.5 | −9.667 |
| D-2704 | >0.5 | −1.989 |
| D-2705 | >0.5 | −8.5 |
| D-2706 | >0.167 | |
| D-2707 | >0.167 | |
| D-2708 | 0.103 | −32.624 |
| D-2709 | >0.5 | −2.042 |
| D-2710 | >0.5 | −5.079 |
| D-2712 | >0.5 | −1.399 |
| D-2717 | >0.5 | −1.399 |
| D-2718 | 0.00521 | −38.552 |
| D-2719 | 0.013 | |
| D-2720 | >0.5 | −2.52 |
| D-2721 | >0.5 | −3.882 |
| D-2722 | >0.5 | −6.527 |
| D-2723 | >0.5 | −16.917 |
| D-2724 | 0.0227 | −46.386 |
| D-2725 | 0.0187 | |
| D-2726 | 0.0105 | |
| D-2727 | 0.0124 | −38.592 |
| D-2728 | 0.00741 | −30.796 |
| D-2729 | 0.0152 | −36.3 |
| D-2730 | >0.5 | −17.996 |
| D-2731 | 0.00433 | −45.007 |
| D-2732 | >0.5 | −4.662 |
| D-2733 | >0.5 | −8.838 |
| D-2734 | >0.5 | −11.614 |
| D-2735 | >0.5 | −15.778 |
| D-2736 | >0.5 | −17.337 |
| D-2737 | >0.5 | −11.139 |
| D-2717 | >0.5 | −6.604 |
| D-2738 | 0.00878 | −30.636 |
| D-2739 | >0.5 | −12.614 |
| D-2740 | 0.013 | −57.307 |
| D-2741 | 0.00938 | −48.272 |
| D-2742 | 0.0271 | |
| D-2743 | 0.00623 | −41.449 |
| D-2744 | 0.015 | −37.951 |
| D-2745 | 0.00611 | −53.267 |
| D-2746 | 0.0108 | −63.434 |
| D-2747 | >0.5 | −13.578 |
| D-2748 | 0.0382 | −38.04 |
| D-2749 | >0.5 | −8.412 |
| D-2750 | >0.5 | −2.25 |
| D-2751 | >0.5 | −12.014 |
| D-2752 | >0.5 | 10.68 |
| D-2753 | >0.5 | −3.443 |
| D-2754 | 0.0704 | −40.897 |
| D-2755 | >0.5 | −9.405 |
| D-2756 | >0.5 | −18.327 |
| D-2757 | >0.5 | −10.531 |
| D-2758 | >0.5 | −13.929 |
| D-2759 | 0.0174 | −39.948 |
| D-2760 | 0.048 | −66.415 |
| D-2761 | >0.5 | −14.128 |
| D-2762 | 0.0132 | −61.074 |
| D-2763 | 0.0333 | −67.071 |
| D-2764 | >0.5 | −10.771 |
| D-2413 | | −45.832 |
| D-2419 | >0.5 | −4.545 |

### Example 3: Droplet Digital PCR Assay of siRNA for PNPLA3-Rs738409 and PNPLA3-rs738409-rs738408

[0194] Following the manufacturers protocol, thawed human primary hepatocyte cells (Xenotech/Sekisui donor lot #HC3-38) in OptiThaw media (Xenotech cat #K 8000), cells were centrifuged and post media aspiration, resuspended in OptiPlate hepatocyte media (Xenotech cat #K 8200) and plated into 96 well collagen coated plates (Greiner cat #655950). Following a 2-4 hour incubation period, media was removed and replaced with OptiCulture hepatocyte media (Xenotech cat #K 8300). 2-4 hours post addition of OptiCulture media, delivered GalNAc conjugated siRNAs to cells via free uptake (no transfection reagent). Cells were incubated 24-72 hours at 37° C. and 5% CO2. Cells were then lysed with Qiagen RLT buffer (79216)+1% 2-mercaptoethanol (Sigma, M-3148), and lysates were stored at −20° C. RNA was purified using a Qiagen QIA Cube HT instrument (9001793) and a Qiagen RNeasy 96 QIA Cube HT Kit (74171) according to manufacturer's instructions. Samples were analyzed using a QIAxpert system (9002340). cDNA was synthesized from RNA samples using the Applied Biosystems High Capacity cDNA Reverse Transcription kit (4368813), reactions were assembled according to manufacturer's instructions, input RNA concentration varied by sample. Reverse transcription was carried out on a BioRad tetrad thermal cycler (model #PTC-0240G) under the following conditions: 25° C. 10 minutes, 37° C. 120 minutes, 85° C. 5 minutes followed by (an optional) 4° C. infinite hold.

[0195] Droplet digital PCR (ddPCR) was performed using BioRad's QX200 AutoDG droplet digital PCR system according to manufacturer's instructions. Reactions were assembled into an Eppendorf clear 96 well PCR plate (951020303) using BioRad ddPCR Supermix for Probes (1863010), and fluorescently labeled qPCR assays for PNPLA3 (IDT Hs.PT.58.21464637, primer to probe ratio 3.6:1 and TBP (IDT Hs.PT.53a.20105486, primer to probe ratio 3.6:1) and RNase free water (Ambion, A M 9937). Final primer/probe concentration is 900 nM/250 nM respectively, input cDNA concentration varied among wells. Droplets were formed using a BioRad Auto DG droplet generator (1864101) set up with manufacturer recommended consumables (BioRad DG32 cartridges 1864108, BioRad tips 1864121, Eppendorf blue 96 well PCR plate 951020362, BioRad droplet generation oil for probes 1864110 and a BioRad droplet plate assembly). Droplets were amplified on a BioRad C1000 touch thermal cycler (1851197) using the following conditions: enzyme activation 95° C. 10 minutes, denaturation 94° C. 30 seconds followed by annealing/extension 60° C. for one minute, 40 cycles using a 2° C./second ramp rate, enzyme deactivation 98° C. 10 minutes followed by (an optional) 4° C. infinite hold. Samples were then read on a BioRad QX200 Droplet Reader measuring FAM/HEX signal that correlates to PNPLA3 or TBP concentration. Data was analyzed using BioRad's QuantaSoft software package. Samples are gated by channel (fluorescent label) to determine the concentration per sample. Each sample is then expressed as the ratio of the concentration of the gene of interest (PNPLA3)/concentration of the housekeeping gene (TBP) to control for differences in sample loading. Data is then imported into Genedata Screener, where each test siRNA is normalized to the median of the neutral control wells (buffer only). IC50 values are reported in Table 7.

TABLE 7
ddPCR assay on primary hepatocyte cells

| Duplex No. | IC50 (μM) | % PNPLA3 knockdown |
|---|---|---|
| D-2068 | .0339 | −49.628 |
| D-2069 | .00408 | −52.997 |
| D-2070 | .00433 | −42.193 |
| D-2072 | .00884 | −53.16 |
| D-2073 | >2.0 | −7.435 |
| D-2078 | .0044 | −43.123 |
| D-2084 | 0.00499 | −38.791 |
| D-2085 | 0.00539 | −64.312 |
| D-2086 | >2.0 | −14.938 |
| D-2087 | >2.0 | −25.465 |
| D-2088 | 0.207 | −34.944 |
| D-2089 | 0.0107 | −38.791 |
| D-2090 | 0.0218 | −38.977 |
| D-2091 | 0.0508 | −41.209 |
| D-2092 | 0.00192 | −44 |
| D-2093 | 0.00634 | −30.233 |
| D-2094 | >2.0 | 4.93 |
| D-2095 | 0.00181 | −59.814 |
| D-2096 | 0.0181 | −52.807 |
| D-2099 | 0.00549 | −39.296 |
| D-2100 | 0.0142 | −55.281 |
| D-2158 | 0.0681 | −48.649 |
| D-2159 | 0.0325 | −36.036 |
| D-2160 | >0.667 | −13.514 |
| D-2161 | >2.0 | −24.229 |
| D-2162 | 0.0726 | −28.634 |
| D-2163 | >0.667 | −16.3 |
| D-2164 | >2.0 | −15.418 |
| D-2165 | 0.00644 | −26.872 |
| D-2166 | 0.00192 | −30.045 |
| D-2167 | >0.667 | −6.726 |
| D-2168 | >2.0 | −15.418 |
| D-2169 | >2.0 | −13.004 |
| D-2170 | >2.0 | −9.417 |
| D-2171 | 0.00505 | −44.395 |
| D-2172 | 0.003 | −55.336 |
| D-2173 | 0.00598 | −46.188 |
| D-2174 | >2.0 | −9.009 |
| D-2175 | 0.017 | −27.928 |
| D-2176 | 0.00452 | −35.426 |
| D-2177 | >2.0 | 4.5 |
| D-2178 | >2.0 | 1.8 |
| D-2179 | >2.0 | −6.306 |
| D-2180 | 0.00546 | −40.969 |
| D-2181 | 0.00152 | −43.119 |
| D-2182 | 0.00317 | −54.128 |
| D-2183 | 0.00232 | −53.211 |
| D-2184 | 0.0109 | −50.459 |
| D-2185 | >2.0 | −7.339 |
| D-2186 | 0.0021 | −48.624 |
| D-2187 | >2.0 | −11.009 |
| D-2188 | >2.0 | 1.32 |
| D-2191 | 0.0984 | −66.923 |
| D-2192 | 0.124 | −64.231 |
| D-2193 | 0.138 | −60.606 |
| D-2194 | 0.0478 | −54.182 |
| D-2195 | 0.0801 | −47.515 |
| D-2199 | 0.0517 | −62.973 |
| D-2201 | 0.0165 | −72.404 |
| D-2202 | 0.00946 | −49.459 |
| D-2203 | 0.0241 | −58.545 |
| D-2204 | 0.0382 | −45.576 |
| D-2205 | 0.0222 | −50.946 |
| D-2206 | 0.0459 | −46.081 |
| D-2209 | 0.0867 | −46.622 |
| D-2212 | 0.358 | −60 |
| D-2216 | 0.0826 | −58.942 |
| D-2218 | 0.0242 | −63.462 |
| D-2220 | 0.0113 | −69.333 |
| D-2221 | 0.138 | −55.541 |
| D-2224 | 0.0198 | −66.486 |
| D-2225 | 0.245 | −68.077 |
| D-2228 | 0.155 | −44.606 |
| D-2229 | 0.0651 | −38.909 |
| D-2231 | 0.0512 | −56.892 |
| D-2232 | 0.0678 | −67.981 |
| D-2233 | 0.00802 | −57.182 |
| D-2234 | 0.00473 | −55.947 |
| D-2235 | 0.00816 | −62.115 |
| D-2236 | 0.00245 | −51.542 |
| D-2237 | 0.00495 | −60 |
| D-2238 | 0.00561 | −63.017 |
| D-2239 | 0.00453 | −55.537 |
| D-2240 | 0.00584 | −56.116 |
| D-2241 | 0.00755 | −54.76 |
| D-2242 | 0.0137 | −56.332 |
| D-2243 | 0.00329 | −57.118 |
| D-2244 | 0.0127 | −56.909 |
| D-2245 | 0.00697 | −58.364 |
| D-2246 | 0.00713 | −56.828 |
| D-2247 | 0.00875 | −57.797 |
| D-2248 | 0.0098 | −58.59 |
| D-2249 | 0.00603 | −57.759 |
| D-2250 | 0.0105 | −62.155 |
| D-2251 | 0.00521 | −59.914 |
| D-2252 | 0.00988 | −58.678 |
| D-2253 | 0.00481 | −57.118 |
| D-2254 | 0.00721 | −56.332 |
| D-2255 | 0.00788 | −52.838 |
| D-2256 | 0.00831 | −55.455 |
| D-2257 | 0.00503 | −54.545 |
| D-2258 | 0.00626 | −54.545 |
| D-2259 | 0.00401 | −55.947 |
| D-2260 | 0.00379 | −52.423 |
| D-2261 | 0.00151 | −54.31 |
| D-2262 | 0.00292 | −53.448 |
| D-2263 | 0.00607 | −59.483 |
| D-2264 | 0.00703 | −59.504 |
| D-2265 | >4.0 | −20.524 |
| D-2266 | 0.0129 | −32.727 |
| D-2267 | 0.107 | −27.273 |
| D-2275 | 0.00359 | −45.701 |
| D-2276 | 0.00416 | −43.891 |
| D-2277 | 0.00218 | −49.14 |
| D-2278 | 0.00743 | −42.986 |
| D-2279 | 0.0116 | −53.846 |
| D-2280 | 0.00347 | −36.652 |
| D-2281 | 0.0134 | −37.557 |
| D-2282 | 0.00864 | −34.842 |
| D-2283 | 0.00738 | −49.558 |
| D-2284 | 0.0202 | −38.053 |
| D-2285 | 0.00543 | −45.487 |
| D-2286 | 0.00934 | −47.611 |
| D-2287 | 0.00652 | −55.575 |
| D-2288 | 0.0259 | −61.593 |
| D-2289 | 0.00549 | −53.805 |
| D-2290 | 0.00476 | −51.062 |
| D-2291 | 0.0105 | −42.584 |
| D-2292 | 0.0059 | −45.455 |
| D-2293 | 0.0117 | −45.646 |
| D-2294 | 0.0109 | −52.823 |
| D-2295 | 0.01246 +/− 0.015 | −59.847 +/− 15.2 |
| D-2296 | 0.0279 | −41.346 |
| D-2297 | 0.00529 | −55.926 |
| D-2298 | 0.00838 | −35.577 |
| D-2299 | 0.00832 | −40.865 |
| D-2300 | 0.00371 | −40.096 |
| D-2301 | 0.00563 | −38.365 |
| D-2302 | 0.00639 | −40.385 |
| D-2303 | 0.00669 | −41.25 |
| D-2304 | 0.00212 | −38.462 |
| D-2305 | 0.00573 | −37.736 |
| D-2306 | 0.0645 | −33.962 |
| D-2307 | 0.00232 | −33.019 |
| D-2308 | 0.00181 | −31.132 |
| D-2309 | 0.0447 | −45.283 |
| D-2310 | 0.00655 | −42.453 |
| D-2311 | 0.00613 | −41.509 |
| D-2312 | 0.00941 | −50 |
| D-2313 | 0.0218 | −41.784 |
| D-2314 | 0.0142 | −42.723 |
| D-2315 | 0.0182 | −31.455 |
| D-2316 | >4.0 | −23.005 |
| D-2317 | 0.0228 | −37.089 |
| D-2318 | 0.00809 | −45.352 |
| D-2319 | 0.0165 | −44.601 |
| D-2320 | 0.0184 | −38.373 |
| D-2321 | 0.00766 | −41.627 |
| D-2322 | 0.00815 | −46.507 |
| D-2323 | 0.0168 | −48.325 |
| D-2324 | 0.00663 | −62.254 |
| D-2325 | 0.00716 | −39.367 |
| D-2326 | 0.044 | −52.036 |
| D-2327 | 0.00282 | −65.701 |
| D-2328 | 0.00411 | −53.991 |
| D-2329 | 0.012 | −48.357 |
| D-2330 | 0.019 | −42.593 |
| D-2331 | 0.00448 | −47.418 |
| D-2332 | 0.00944 | −37.327 |
| D-2333 | 0.00514 | −37.327 |
| D-2334 | 0.154 | −38.249 |
| D-2335 | 0.0089 | −40.092 |
| D-2336 | 0.0169 | −48.148 |
| D-2337 | 0.00274 | −46.296 |
| D-2338 | 0.0225 | −42.723 |
| D-2339 | 0.00222 +/− 0.00136 | −43.218 +/− 4.81 |
| D-2340 | 0.0136 | −56.561 |
| D-2341 | 0.0222 | −50.226 |
| D-2342 | 0.0273 | −55.385 |
| D-2343 | 0.0164 | −41.784 |
| D-2344 | 0.0314 | −60.282 |
| D-2345 | 0.0103 | −65.1 |
| D-2346 | 0.0427 | −63.9 |
| D-2347 | 0.00446 | −49.4 |
| D-2348 | 0.113 | −53.4 |
| D-2349 | 0.0176 | −56.3 |
| D-2350 | 0.00467 | −49.4 |

### Example 4: Efficacy Screening of Select PNPLA3 siRNA Molecules in a Humanized Mouse Model

[0196] Associated adenovirus (AAV; serotype AAV8 or AAV7; endotoxin-free, prepared internally by Amgen) diluted in phosphate buffered saline (Thermo Fisher Scientific, 14190-136) to 4e11 up to 1e12 viral particles per animal, was injected intravenously into the tail vein of C57BL/6N Crl male mice (Charles River Laboratories Inc.) to drive expression of either human PNPLA3WT (PNPLA3-WT), PNPLA3^{rs738409} (PNPLA3-1148M), or PNPLA3^{rs738409-rs738408} (PNPLA3-I148M DM) in the liver. M ice were generally 10-12 weeks of age and an n=4-6 animals were included per group. Every round of screening included at least two vehicle-treated control groups: AAV-empty vector and AAV-PNPLA3^{WT} or PNPLA3^{rs738409} and PNPLA3^{rs738409-rs738408} treated with vehicle. All siRNAs were tested against AAV-PNPLA3^{WT}, PNPLA3^{rs738409}, and/or PNPLA3^{rs738409-rs738408}. Two weeks after AAV injection, mice were treated with a single dose of SiRNA D-2324 (0.5 mM), via subcutaneous injection, at 0.5, 1.0, 3.0 or 5.0 milligrams per kilogram of animal, diluted in phosphate buffered saline (Thermo Fisher Scientific, 14190-136). At 8, 15, 22, 28 or 42 days post-siRNA injection, livers were collected from the animals, snap frozen in liquid nitrogen, processed for purified RNA using a QIA Cube HT instrument (Qiagen, 9001793) and RNeasy 96 QIACube HT kits (Qiagen, 74171) according to manufacturer's instructions. Samples were analyzed using a QIAxpert system (Qiagen, 9002340). RNA was treated with RQ1 RNase-Free DNase (Promega, M 6101) and prepared for Real-Time qPCR using the TaqMan™ RNA-to-C_{T}™ 1-Step kit (Applied Biosystems, 4392653). Real-Time qPCR was run on a QuantStudio Real-Time PCR machine. Results are based on gene expression of human PNPLA3 as normalized to mouse Gapdh (TaqMan™ assays from Invitrogen, hs00228747_ml and 4352932E, respectively), and presented as the relative knockdown of human PNPLA3 mRNA expression compared to vehicle-treated control animals. Endogenous mouse Pnpla3 expression was determined for comparison (Invitrogen, Mm00504420_m1).

[0197] For hepatic triglyceride content analysis, approximately 0.05-0.1 milligrams of frozen liver from an animal was homogenized in one milliliter of isopropanol. After one hour of incubation on ice, samples were spun at 10,000 rpm in a microfuge, and supernatants transferred to a clean deep-well 96-well plate. Triglyceride content was determined using the colorimetric Infinity Triglyceride Reagent (Thermo Fisher Scientific, TR22421) and Triglyceride Standard (Pointe Scientific, T7531-STD) according to manufacturer's instructions. Results are presented as milligrams of triglyceride per milligrams of tissue.

[0198] FIGS. 1A-D. An example of five siRNA molecules screened for both dose-dependent mRNA knockdown and functional durability in vivo. Mice expressing human PNPLA3^{rs738409-rs738408} were treated with siRNA two-weeks after intravenous AAV injections. N=6 mice per group; data represented as the average and the standard error of the mean. (A) siRNAs were injected at 0.5, 1.0, 3.0, or 5.0 milligrams per kilogram of body weight subcutaneously into the abdomen of the mouse. Four weeks after siRNA treatment, mice were sacrificed, and the livers were collected and processed for gene expression analysis. The data represents the average relative knockdown of human PNPLA3^{rs738409-rs738408}; in each group set to the vehicle-treated control group. (B) Livers from the same four-week treatment group were also processed for triglyceride content to access functional efficacy. The data represents the average milligrams of triglyceride per gram of tissue processed. (C) siRNAs were injected at 1.0 and 3.0 milligrams per kilogram of body weight subcutaneously into the abdomen of a parallel cohort of animals. Mice were harvested six weeks after siRNA treatment to compare durability of the siRNA molecules in vivo. The livers were collected and processed for gene expression analysis. The data represents the average relative knockdown of human PNPLA3^{rs738409-rs738408} in each group set to the vehicle-treated control group. (D) Livers from the same six-week treatment group were also processed for triglyceride content to access functional efficacy over time. The data represents the average milligrams of triglyceride per gram of tissue processed.

[0199] Data for relative knockdown is shown in Tables 8-12, showing relative knockdown at day 8, 15, 22, 28, and 42, respectively and the various doses. PNPLA3 knockdown is a percentage, with negative values indicating a decrease in PNPLA3 levels.

TABLE 8
Day 8 PNPLA3 knockdown assay

| | | AAV | Dose | PNPLA3 |
|---|---|---|---|---|
| Duplex | | particles/ | administered | knockdown |
| number | AAV vector | animal | (mg/kg) | (%) |
| D-2092 | PNPLA3-I148M | 1.00E+12 | 3 | −91.51 |
| D-2092 | PNPLA3-I148M | 1.00E+12 | 5 | −92.64 |
| D-2095 | PNPLA3-I148M | 1.00E+12 | 3 | −79.21 |
| D-2095 | PNPLA3-I148M | 1.00E+12 | 5 | −86.38 |
| D-2068 | PNPLA3-I148M | 4.00E+11 | 5 | −34.15 |
| D-2069 | PNPLA3-I148M | 4.00E+11 | 5 | −82.74 |
| D-2070 | PNPLA3-I148M | 4.00E+11 | 5 | −79.64 |
| D-2071 | PNPLA3-I148M | 4.00E+11 | 5 | −48.80 |
| D-2071 | PNPLA3-WT | 4.00E+11 | 5 | −59.43 |
| D-2075 | PNPLA3-I148M | 4.00E+11 | 5 | −79.10 |
| D-2075 | PNPLA3-WT | 4.00E+11 | 5 | −60.60 |
| D-2079 | PNPLA3-I148M | 4.00E+11 | 5 | −50.08 |
| D-2072 | PNPLA3-I148M | 4.00E+11 | 5 | −44.40 |
| D-2072 | PNPLA3-WT | 4.00E+11 | 5 | −43.75 |
| D-2077 | PNPLA3-I148M | 4.00E+11 | 5 | −28.46 |
| D-2076 | PNPLA3-I148M | 4.00E+11 | 5 | −83.25 |
| D-2078 | PNPLA3-I148M | 4.00E+11 | 5 | −49.10 |
| D-2078 | PNPLA3-WT | 4.00E+11 | 5 | −3.45 |
| D-2073 | PNPLA3-I148M | 4.00E+11 | 5 | −39.42 |
| D-2074 | PNPLA3-I148M | 4.00E+11 | 5 | −46.68 |
| D-2074 | PNPLA3-WT | 4.00E+11 | 5 | −5.11 |
| D-2084 | PNPLA3-I148M | 4.00E+11 | 5 | −87.49 |
| D-2084 | PNPLA3-I148M | 8.00E+11 | 5 | −88.75 |
| D-2084 | PNPLA3-I148M | 8.00E+11 | 1 | −16.49 |
| D-2084 | PNPLA3-WT | 8.00E+11 | 1 | −15.42 |
| D-2085 | PNPLA3-I148M | 4.00E+11 | 5 | −77.14 |
| D-2085 | PNPLA3-I148M | 8.00E+11 | 5 | −84.42 |
| D-2085 | PNPLA3-I148M | 8.00E+11 | 1 | −25.19 |
| D-2085 | PNPLA3-WT | 8.00E+11 | 1 | −21.14 |
| D-2086 | PNPLA3-I148M | 4.00E+11 | 5 | −64.54 |
| D-2086 | PNPLA3-I148M | 4.00E+11 | 5 | −52.95 |
| D-2087 | PNPLA3-I148M | 4.00E+11 | 5 | −20.15 |
| D-2088 | PNPLA3-I148M | 4.00E+11 | 5 | −47.18 |
| D-2088 | PNPLA3-I148M | 8.00E+11 | 5 | −66.96 |
| D-2089 | PNPLA3-I148M | 8.00E+11 | 5 | −85.47 |
| D-2089 | PNPLA3-WT | 8.00E+11 | 1 | −21.01 |
| D-2089 | PNPLA3-I148M | 8.00E+11 | 1 | −34.21 |
| D-2089 | PNPLA3-I148M | 1.00E+12 | 5 | −90.55 |
| D-2090 | PNPLA3-I148M | 8.00E+11 | 5 | −89.58 |
| D-2090 | PNPLA3-I148M | 8.00E+11 | 1 | −50.13 |
| D-2090 | PNPLA3-WT | 8.00E+11 | 1 | 8.76 |
| D-2091 | PNPLA3-WT | 8.00E+11 | 5 | −35.70 |
| D-2092 | PNPLA3-I148M | 8.00E+11 | 5 | −92.34 |
| D-2092 | PNPLA3-I148M | 8.00E+11 | 1 | −51.35 |
| D-2092 | PNPLA3-WT | 8.00E+11 | 1 | −42.88 |
| D-2093 | PNPLA3-I148M | 8.00E+11 | 5 | −83.87 |
| D-2094 | PNPLA3-I148M | 8.00E+11 | 5 | −70.12 |
| D-2095 | PNPLA3-I148M | 8.00E+11 | 1 | −29.95 |
| D-2095 | PNPLA3-WT | 8.00E+11 | 1 | 67.40 |
| D-2095 | PNPLA3-I148M | 8.00E+11 | 5 | −85.42 |
| D-2096 | PNPLA3-WT | 8.00E+11 | 5 | −90.44 |
| D-2081 | PNPLA3-I148M | 8.00E+11 | 5 | 6.25 |
| D-2081 | PNPLA3-I148M | 8.00E+11 | 5 | −11.81 |
| D-2097 | PNPLA3-I148M | 8.00E+11 | 5 | −87.61 |
| D-2098 | PNPLA3-I148M | 8.00E+11 | 5 | −79.84 |
| D-2099 | PNPLA3-I148M | 8.00E+11 | 5 | −84.36 |
| D-2100 | PNPLA3-I148M | 8.00E+11 | 5 | −79.67 |
| D-2101 | PNPLA3-I148M | 8.00E+11 | 5 | −89.64 |
| D-2102 | PNPLA3-I148M | 8.00E+11 | 5 | −61.49 |
| D-2103 | PNPLA3-I148M | 8.00E+11 | 5 | −19.65 |
| D-2104 | PNPLA3-I148M | 8.00E+11 | 5 | −79.70 |
| D-2104 | PNPLA3-I148M | 1.00E+12 | 5 | −82.87 |
| D-2105 | PNPLA3-I148M | 8.00E+11 | 5 | −84.49 |
| D-2105 | PNPLA3-I148M | 1.00E+12 | 5 | −87.71 |
| D-2152 | PNPLA3-I148M | 1.00E+12 | 5 | −39.35 |
| D-2153 | PNPLA3-I148M | 1.00E+12 | 5 | −79.04 |
| D-2154 | PNPLA3-I148M | 1.00E+12 | 5 | −66.72 |
| D-2155 | PNPLA3-I148M | 1.00E+12 | 5 | −44.68 |
| D-2156 | PNPLA3-I148M | 1.00E+12 | 5 | −84.72 |
| D-2157 | PNPLA3-I148M | 1.00E+12 | 5 | −17.25 |
| D-2280 | PNPLA3-I148M DM | 1.00E+12 | 5 | −99.70 |
| D-2280 | PNPLA3 WT | 1.00E+12 | 5 | −51.13 |
| D-2295 | PNPLA3-WT | 1.00E+12 | 5 | −35.90 |
| D-2295 | PNPLA3-I148M DM | 1.00E+12 | 5 | −94.68 |
| D-2296 | PNPLA3-WT | 1.00E+12 | 5 | −23.24 |
| D-2296 | PNPLA3-I148M DM | 1.00E+12 | 5 | −92.78 |
| D-2297 | PNPLA3-WT | 1.00E+12 | 5 | 43.71 |
| D-2297 | PNPLA3-I148M DM | 1.00E+12 | 5 | −94.59 |
| D-2324 | PNPLA3-WT | 1.00E+12 | 5 | 6.53 |
| D-2324 | PNPLA3-I148M DM | 1.00E+12 | 5 | −97.39 |
| D-2326 | PNPLA3-WT | 1.00E+12 | 5 | −8.25 |
| D-2326 | PNPLA3-I148M DM | 1.00E+12 | 5 | −77.82 |
| D-2328 | PNPLA3-WT | 1.00E+12 | 5 | −2.12 |
| D-2328 | PNPLA3-I148M DM | 1.00E+12 | 5 | −92.49 |

TABLE 9
Day 15 PNPLA3 knockdown assay

| | | AAV | Dose | PNPLA3 |
|---|---|---|---|---|
| Duplex | | particles/ | administered | knockdown |
| number | AAV vector | animal | (mg/kg) | (%) |
| D-2092 | PNPLA3-I148M | 1.00E+12 | 3 | −87.58 |
| D-2092 | PNPLA3-I148M | 1.00E+12 | 5 | −93.96 |
| D-2095 | PNPLA3-I148M | 1.00E+12 | 3 | −81.73 |
| D-2095 | PNPLA3-I148M | 1.00E+12 | 5 | −72.99 |
| D-2131 | PNPLA3-I148M | 1.00E+12 | 5 | −66.02 |
| D-2186 | PNPLA3-I148M | 1.00E+12 | 5 | −87.67 |
| D-2089 | PNPLA3-I148M | 1.00E+12 | 5 | −95.01 |
| D-2104 | PNPLA3-I148M | 1.00E+12 | 5 | −76.01 |
| D-2105 | PNPLA3-I148M | 1.00E+12 | 5 | −72.67 |
| D-2123 | PNPLA3-I148M | 1.00E+12 | 5 | −56.93 |
| D-2128 | PNPLA3-I148M | 1.00E+12 | 5 | −37.26 |
| D-2138 | PNPLA3-I148M | 1.00E+12 | 5 | −62.16 |
| D-2149 | PNPLA3-I148M | 1.00E+12 | 5 | −72.34 |
| D-2156 | PNPLA3-I148M | 1.00E+12 | 5 | −75.81 |
| D-2259 | PNPLA3-I148M | 1.00E+12 | 5 | −79.15 |
| D-2260 | PNPLA3-I148M | 1.00E+12 | 5 | −69.97 |
| D-2261 | PNPLA3-I148M | 1.00E+12 | 5 | −50.40 |
| D-2262 | PNPLA3-I148M | 1.00E+12 | 5 | −84.36 |
| D-2263 | PNPLA3-I148M | 1.00E+12 | 5 | −77.08 |
| D-2264 | PNPLA3-I148M | 1.00E+12 | 5 | −40.86 |
| D-2269 | PNPLA3-I148M | 1.00E+12 | 5 | −37.55 |
| D-2270 | PNPLA3-I148M | 1.00E+12 | 5 | −77.42 |
| D-2271 | PNPLA3-I148M | 1.00E+12 | 5 | −26.87 |
| D-2272 | PNPLA3-I148M | 1.00E+12 | 5 | −56.05 |
| D-2280 | PNPLA3-I148M DM | 1.00E+12 | 3 | −86.30 |
| D-2287 | PNPLA3-I148M DM | 1.00E+12 | 3 | −94.73 |
| D-2289 | PNPLA3-I148M DM | 1.00E+12 | 3 | −93.48 |
| D-2292 | PNPLA3-I148M DM | 1.00E+12 | 3 | −82.48 |
| D-2297 | PNPLA3-I148M DM | 1.00E+12 | 3 | −72.61 |
| D-2322 | PNPLA3-I148M DM | 1.00E+12 | 3 | −32.92 |
| D-2324 | PNPLA3-I148M DM | 1.00E+12 | 3 | −87.56 |
| D-2327 | PNPLA3-I148M DM | 1.00E+12 | 3 | −86.70 |
| D-2345 | PNPLA3-WT | 1.00E+12 | 5 | −83.48 |
| D-2346 | PNPLA3-WT | 1.00E+12 | 5 | −75.93 |
| D-2347 | PNPLA3-WT | 1.00E+12 | 5 | −22.83 |
| D-2348 | PNPLA3-WT | 1.00E+12 | 5 | −20.09 |
| D-2349 | PNPLA3-WT | 1.00E+12 | 5 | −67.70 |
| D-2350 | PNPLA3-WT | 1.00E+12 | 5 | −57.51 |
| D-2351 | PNPLA3-WT | 1.00E+12 | 5 | −56.11 |
| D-2352 | PNPLA3-I148M DM | 1.00E+12 | 3 | −92.21 |
| D-2353 | PNPLA3-I148M DM | 1.00E+12 | 3 | −89.55 |
| D-2354 | PNPLA3-I148M DM | 1.00E+12 | 3 | −90.21 |
| D-2358 | PNPLA3-I148M DM | 1.00E+12 | 3 | −95.10 |
| D-2359 | PNPLA3-I148M DM | 1.00E+12 | 3 | −91.17 |
| D-2360 | PNPLA3-I148M DM | 1.00E+12 | 3 | −63.98 |
| D-2361 | PNPLA3-I148M DM | 1.00E+12 | 3 | −92.47 |
| D-2362 | PNPLA3-I148M DM | 1.00E+12 | 3 | −95.10 |
| D-2364 | PNPLA3-I148M DM | 1.00E+12 | 3 | −95.31 |
| D-2370 | PNPLA3-I148M DM | 1.00E+12 | 3 | −95.99 |
| D-2370 | PNPLA3 WT | 1.00E+12 | 3 | 11.88 |
| D-2371 | PNPLA3-I148M DM | 1.00E+12 | 3 | −91.14 |
| D-2372 | PNPLA3-I148M DM | 1.00E+12 | 3 | −93.71 |
| D-2373 | PNPLA3-I148M DM | 1.00E+12 | 3 | −73.80 |
| D-2374 | PNPLA3-I148M DM | 1.00E+12 | 3 | −75.98 |
| D-2375 | PNPLA3-I148M DM | 1.00E+12 | 3 | −96.68 |
| D-2376 | PNPLA3-I148M DM | 1.00E+12 | 3 | −96.78 |
| D-2377 | PNPLA3-I148M DM | 1.00E+12 | 3 | −96.88 |
| D-2378 | PNPLA3-I148M DM | 1.00E+12 | 3 | −97.60 |
| D-2379 | PNPLA3-I148M DM | 1.00E+12 | 3 | −94.73 |
| D-2380 | PNPLA3-I148M DM | 1.00E+12 | 3 | −94.73 |
| D-2381 | PNPLA3-I148M DM | 1.00E+12 | 3 | −76.24 |
| D-2382 | PNPLA3-I148M DM | 1.00E+12 | 3 | −80.33 |
| D-2383 | PNPLA3-I148M DM | 1.00E+12 | 3 | −71.98 |
| D-2384 | PNPLA3-I148M DM | 1.00E+12 | 3 | −87.24 |
| D-2385 | PNPLA3-I148M DM | 1.00E+12 | 3 | −78.77 |
| D-2386 | PNPLA3-I148M DM | 1.00E+12 | 3 | −70.58 |
| D-2387 | PNPLA3-I148M DM | 1.00E+12 | 3 | −67.09 |
| D-2390 | PNPLA3-I148M DM | 1.00E+12 | 3 | −92.97 |
| D-2391 | PNPLA3-I148M DM | 1.00E+12 | 3 | −94.10 |
| D-2392 | PNPLA3-I148M DM | 1.00E+12 | 3 | −92.14 |
| D-2395 | PNPLA3-I148M DM | 1.00E+12 | 3 | −85.63 |
| D-2396 | PNPLA3-I148M DM | 1.00E+12 | 3 | −94.63 |
| D-2397 | PNPLA3-I148M DM | 1.00E+12 | 3 | −92.90 |
| D-2398 | PNPLA3-I148M DM | 1.00E+12 | 3 | −95.48 |
| D-2399 | PNPLA3-I148M DM | 1.00E+12 | 3 | −93.40 |
| D-2400 | PNPLA3-I148M DM | 1.00E+12 | 3 | −97.55 |
| D-2401 | PNPLA3-I148M DM | 1.00E+12 | 3 | −96.98 |
| D-2402 | PNPLA3-I148M DM | 1.00E+12 | 3 | −97.25 |
| D-2403 | PNPLA3 WT | 1.00E+12 | 3 | 36.90 |
| D-2404 | PNPLA3-I148M DM | 1.00E+12 | 3 | −95.08 |
| D-2405 | PNPLA3-I148M DM | 1.00E+12 | 3 | −96.93 |
| D-2406 | PNPLA3 WT | 1.00E+12 | 3 | 28.80 |
| D-2395 | PNPLA3-I148M DM | 1.00E+12 | 3 | −17.25 |
| D-2396 | PNPLA3-I148M DM | 1.00E+12 | 3 | −93.70 |
| D-2413 | PNPLA3-I148M DM | 1.00E+12 | 3 | −94.80 |
| D-2415 | PNPLA3-I148M DM | 1.00E+12 | 3 | −90.95 |
| D-2418 | PNPLA3-I148M DM | 1.00E+12 | 3 | −88.45 |
| D-2419 | PNPLA3 WT | 1.00E+12 | 3 | 43.72 |
| D-2453 | PNPLA3 WT | 1.00E+12 | 3 | −81.33 |
| D-2454 | PNPLA3 WT | 1.00E+12 | 3 | −83.38 |
| D-2455 | PNPLA3 WT | 1.00E+12 | 3 | −68.85 |
| D-2456 | PNPLA3 WT | 1.00E+12 | 3 | −89.03 |
| D-2460 | PNPLA3 WT | 1.00E+12 | 3 | −68.65 |
| D-2461 | PNPLA3 WT | 1.00E+12 | 3 | −47.85 |

TABLE 10
Day 22 PNPLA3 knockdown assay

| | | AAV | Dose | PNPLA3 |
|---|---|---|---|---|
| Duplex | | particles/ | administered | knockdown |
| number | AAV vector | animal | (mg/kg) | (%) |
| D-2092 | PNPLA3-I148M | 1.00E+12 | 3 | −74.61 |
| D-2092 | PNPLA3-I148M | 1.00E+12 | 5 | −85.78 |
| D-2095 | PNPLA3-I148M | 1.00E+12 | 3 | −27.78 |
| D-2095 | PNPLA3-I148M | 1.00E+12 | 5 | −33.60 |
| D-2324 | PNPLA3-I148M DM | 1.00E+12 | 3 | −56.68 |
| D-2324 | PNPLA3-I148M DM | 1.00E+12 | 5 | −88.02 |
| D-2089 | PNPLA3-I148M | 1.00E+12 | 5 | −80.86 |
| D-2104 | PNPLA3-I148M | 1.00E+12 | 5 | −65.61 |
| D-2105 | PNPLA3-I148M | 1.00E+12 | 5 | −39.67 |
| D-2280 | PNPLA3-I148M DM | 1.00E+12 | 5 | −84.12 |
| D-2297 | PNPLA3-I148M DM | 1.00E+12 | 3 | −58.01 |
| D-2297 | PNPLA3-I148M DM | 1.00E+12 | 5 | −76.43 |
| D-2352 | PNPLA3-I148M DM | 1.00E+12 | 5 | −92.74 |
| D-2353 | PNPLA3-I148M DM | 1.00E+12 | 5 | −84.54 |
| D-2354 | PNPLA3-I148M DM | 1.00E+12 | 5 | −89.06 |
| D-2355 | PNPLA3-I148M DM | 1.00E+12 | 5 | −95.53 |
| D-2356 | PNPLA3-I148M DM | 1.00E+12 | 5 | −94.99 |
| D-2357 | PNPLA3-I148M DM | 1.00E+12 | 5 | −97.37 |

TABLE 11
Day 28 PNPLA3 knockdown assay

| | | AAV | Dose | PNPLA3 |
|---|---|---|---|---|
| Duplex | | particles/ | administered | knockdown |
| number | AAV vector | animal | (mg/kg) | (%) |
| D-2092 | PNPLA3-I148M | 1.00E+12 | 3 | −72.57 |
| D-2092 | PNPLA3-I148M | 1.00E+12 | 5 | −82.74 |
| D-2095 | PNPLA3-I148M | 1.00E+12 | 3 | −32.93 |
| D-2095 | PNPLA3-I148M | 1.00E+12 | 5 | −55.31 |
| D-2089 | PNPLA3-I148M | 1.00E+12 | 5 | −63.49 |
| D-2104 | PNPLA3-I148M | 1.00E+12 | 5 | −44.39 |
| D-2105 | PNPLA3-I148M | 1.00E+12 | 5 | −39.80 |
| D-2370 | PNPLA3-I148M DM | 1.00E+12 | 3 | −89.28 |
| D-2400 | PNPLA3-I148M DM | 1.00E+12 | 3 | −88.23 |
| D-2401 | PNPLA3-I148M DM | 1.00E+12 | 3 | −91.95 |
| D-2402 | PNPLA3-I148M DM | 1.00E+12 | 0.5 | −50.65 |
| D-2402 | PNPLA3-I148M DM | 1.00E+12 | 1 | −69.37 |
| D-2402 | PNPLA3-I148M DM | 1.00E+12 | 3 | −96.43 |
| D-2402 | PNPLA3-I148M DM | 1.00E+12 | 3 | −85.44 |
| D-2402 | PNPLA3-I148M DM | 1.00E+12 | 3 | −90.52 |
| D-2404 | PNPLA3-I148M DM | 1.00E+12 | 3 | −95.67 |
| D-2419 | PNPLA3-I148M DM | 1.00E+12 | 0.5 | −68.83 |
| D-2419 | PNPLA3-I148M DM | 1.00E+12 | 1 | −76.88 |
| D-2419 | PNPLA3-I148M DM | 1.00E+12 | 3 | −97.53 |
| D-2419 | PNPLA3-I148M DM | 1.00E+12 | 3 | −93.95 |
| D-2419 | PNPLA3-I148M DM | 1.00E+12 | 3 | −89.66 |
| D-2419 | PNPLA3-I148M DM | 1.00E+12 | 3 | −93.25 |
| D-2420 | PNPLA3-I148M DM | 1.00E+12 | 3 | −95.93 |
| D-2421 | PNPLA3-I148M DM | 1.00E+12 | 0.5 | −50.01 |
| D-2421 | PNPLA3-I148M DM | 1.00E+12 | 1 | −66.30 |
| D-2421 | PNPLA3-I148M DM | 1.00E+12 | 3 | −94.99 |
| D-2421 | PNPLA3-I148M DM | 1.00E+12 | 3 | −80.05 |
| D-2421 | PNPLA3 WT | 1.00E+12 | 3 | −36.65 |
| D-2421 | PNPLA3-I148M DM | 1.00E+12 | 3 | −91.08 |
| D-2425 | PNPLA3-I148M DM | 1.00E+12 | 3 | −16.07 |
| D-2426 | PNPLA3-I148M DM | 1.00E+12 | 3 | −37.54 |
| D-2427 | PNPLA3-I148M DM | 1.00E+12 | 3 | −25.19 |
| D-2428 | PNPLA3-I148M DM | 1.00E+12 | 3 | −16.71 |
| D-2437 | PNPLA3-I148M DM | 1.00E+12 | 3 | −93.78 |
| D-2438 | PNPLA3-I148M DM | 1.00E+12 | 3 | −90.63 |
| D-2439 | PNPLA3-I148M DM | 1.00E+12 | 3 | −88.10 |
| D-2440 | PNPLA3-I148M DM | 1.00E+12 | 3 | −95.25 |
| D-2441 | PNPLA3-I148M DM | 1.00E+12 | 3 | −90.13 |
| D-2442 | PNPLA3-I148M DM | 1.00E+12 | 3 | −57.24 |
| D-2443 | PNPLA3-I148M DM | 1.00E+12 | 3 | −95.43 |
| D-2444 | PNPLA3-I148M DM | 1.00E+12 | 3 | −90.58 |
| D-2445 | PNPLA3-I148M DM | 1.00E+12 | 3 | −84.55 |
| D-2446 | PNPLA3-I148M DM | 1.00E+12 | 3 | −81.50 |
| D-2427 | PNPLA3-I148M DM | 1.00E+12 | 3 | −90.09 |
| D-2462 | PNPLA3-I148M DM | 1.00E+12 | 3 | −89.20 |
| D-2463 | PNPLA3-I148M DM | 1.00E+12 | 3 | −41.25 |
| D-2464 | PNPLA3-I148M DM | 1.00E+12 | 3 | −60.53 |
| D-2465 | PNPLA3-I148M DM | 1.00E+12 | 3 | −91.35 |
| D-2466 | PNPLA3-I148M DM | 1.00E+12 | 3 | −93.68 |
| D-2467 | PNPLA3-I148M DM | 1.00E+12 | 3 | −85.15 |
| D-2472 | PNPLA3-I148M DM | 1.00E+12 | 0.5 | −46.58 |
| D-2472 | PNPLA3-I148M DM | 1.00E+12 | 1 | −74.47 |
| D-2472 | PNPLA3-I148M DM | 1.00E+12 | 3 | −88.79 |
| D-2472 | PNPLA3 WT | 1.00E+12 | 3 | −23.16 |
| D-2472 | PNPLA3-I148M DM | 1.00E+12 | 3 | −90.54 |
| D-2473 | PNPLA3-I148M DM | 1.00E+12 | 0.5 | −57.95 |
| D-2473 | PNPLA3-I148M DM | 1.00E+12 | 1 | −71.96 |
| D-2473 | PNPLA3-I148M DM | 1.00E+12 | 3 | −91.70 |
| D-2473 | PNPLA3-I148M DM | 1.00E+12 | 3 | −85.94 |
| D-2473 | PNPLA3 WT | 1.00E+12 | 3 | −18.70 |
| D-2675 | PNPLA3-I148M DM | 1.00E+12 | 3 | −25.9 |
| D-2677 | PNPLA3-I148M DM | 1.00E+12 | 3 | −3.807 |
| D-2678 | PNPLA3-I148M DM | 1.00E+12 | 3 | −31.76 |
| D-2679 | PNPLA3-I148M DM | 1.00E+12 | 3 | −88.48 |
| D-2680 | PNPLA3-I148M DM | 1.00E+12 | 3 | −56.44 |
| D-2681 | PNPLA3-I148M DM | 1.00E+12 | 3 | −35.71 |
| D-2682 | PNPLA3-I148M DM | 1.00E+12 | 3 | −71.43 |
| D-2683 | PNPLA3-I148M DM | 1.00E+12 | 3 | −68.62 |
| D-2685 | PNPLA3-I148M DM | 1.00E+12 | 3 | −29.93 |
| D-2687 | PNPLA3-I148M DM | 1.00E+12 | 3 | −75.05 |
| D-2689 | PNPLA3-I148M DM | 1.00E+12 | 3 | −81.12 |
| D-2690 | PNPLA3-I148M DM | 1.00E+12 | 3 | −79.08 |
| D-2694 | PNPLA3-I148M DM | 1.00E+12 | 3 | −4.531 |
| D-2695 | PNPLA3-I148M DM | 1.00E+12 | 3 | 29.23 |
| D-2668 | PNPLA3-I148M DM | 1.00E+12 | 3 | −65.16 |
| D-2669 | PNPLA3-I148M DM | 1.00E+12 | 3 | −78.36 |
| D-2670 | PNPLA3-I148M DM | 1.00E+12 | 3 | −56.05 |
| D-2671 | PNPLA3-I148M DM | 1.00E+12 | 3 | −56.87 |

TABLE 12
Day 42 PNPLA3 knockdown assay

| | | AAV | Dose | PNPLA3 |
|---|---|---|---|---|
| Duplex | | particles/ | administered | knockdown |
| number | AAV vector | animal | (mg/kg) | (%) |
| D-2402 | PNPLA3-I148M DM | 1.00E+12 | 1 | −57.74 |
| D-2402 | PNPLA3-I148M DM | 1.00E+12 | 3 | −83.75 |
| D-2419 | PNPLA3-I148M DM | 1.00E+12 | 1 | −71.07 |
| D-2419 | PNPLA3-I148M DM | 1.00E+12 | 3 | −70.8 |
| D-2421 | PNPLA3-I148M DM | 1.00E+12 | 1 | −62.21 |
| D-2421 | PNPLA3-I148M DM | 1.00E+12 | 3 | −80.12 |
| D-2472 | PNPLA3-I148M DM | 1.00E+12 | 1 | −60.54 |
| D-2472 | PNPLA3-I148M DM | 1.00E+12 | 3 | −74.77 |
| D-2473 | PNPLA3-I148M DM | 1.00E+12 | 1 | −54.55 |
| D-2473 | PNPLA3-I148M DM | 1.00E+12 | 3 | −81.13 |

### Example 5: Prevention and Rescue of NAFLD by siRNA Molecules in a Humanized PNPLA3^{rs738409-rs738408} Mouse Model

[0200] The ‘American Lifestyle-Induced Obesity Syndrome’, or ALIOS mouse model for NAFLD/NASH is developed by feeding mice with a diet high in trans-fats (45% of the total amount of fat) and sugar (Tetri 2008). For these studies, eight to ten-week old C57B L/6N Crl male mice (Charles River Laboratories Inc.) were injected with AAV-empty vector or AAV8-PNPLA3^{rs738409-rs738408}, as described previously. At the time of AAV injection, mice were either maintained on a normal chow diet or placed on the ALIOS diet (Envigo, TD.06303) complete with drinking water composed of 55% fructose and 45% glucose (Sigma, F0127 and G7021, respectively) until harvest. In previous experiments, it was established that over-expression of PNPLA3^{rs738409-rs738408}, in this context, both accelerates and worsens NAFLD phenotypes (data not shown).

[0201] Two weeks after AAV injection and diet initiation, mice were treated with a single dose of siRNA D-2324 (0.5 mM), via subcutaneous injection, at 5.0 milligrams per kilogram of animal, diluted in phosphate buffered saline (Thermo Fisher Scientific, 14190-136) or a vehicle control. Dosing was repeated biweekly until harvest. At the time of harvest, body weights were collected, followed by serum via cardiac puncture under isoflurane anesthesia, followed by liver weights. The median lobe was fixed via 10% neutral buffered formalin, followed by paraffin processing and embedding. The remainder of the liver was snap frozen for content and gene expression analysis, as described previously.

[0202] Snap frozen liver tissue was processed for RNA and gene expression analysis, as described previously. Results are shown as both the raw Ct value and relative mRNA expression of the indicated gene normalized to mouse Gapdh. (TaqMan™ assays from Invitrogen: human PNPLA3, hs00228747_ml; mouse Pnpla3, M m00504420_m1; mouse Gapdh, 4352932E).

[0203] Formalin-fixed tissues were processed for Hemotoxylin and Eosin staining (Dako, CS70030-2, CS70130-2, respectively) according to the manufacturer's instructions. Scoring for steatosis and inflammation was performed by a board-certified pathologist.

[0204] Serum analysis included TIMP1, a biomarker associated with NASH and NASH-related fibrosis (Youssani 2011). The TIMP1 ELISA (R&D Systems, MTM 100) was performed according to the manufacturer's instructions.

[0205] FIGS. 2A-G. To evaluate the ability of a PNPLA3^{rs738409-rs738408}-specific siRNA molecule D-2324 to prevent the development of phenotypes associated with NAFLD and overexpression of PNPLA3^{rs738409-rs738408}, mice received AAV8-empty vector (EV), or AAV8-PNPLA3^{rs738409-rs738408}, or vehicle, and were maintained on a regular chow diet or transitioned to the ALIOS diet. Two weeks after AAV injections, mice were treated with siRNA or vehicle, every other week for six weeks; a total of three injection rounds. M ice were harvested at the eight-week time point. Results are presented as the group average and standard error, N=8 per group. A sterisks represent statistical significance to the AAV8-PNPLA3^{rs738409-rs738408} cohort, generated by One-way ANOVA employing Dunnett's multiple comparisons test. (A) The ratio of liver weight (grams) to body weight (grams) at the time of harvest. Adjusted P values: no AAV+vehicle group, ****<0.0001, AAV-EV+vehicle, **=0.0018, AAV-PNPLA3^{rs738409-rs738408}+siRNA, ****<0.0001. (B) Confirmation of human PNPLA3 mRNA expression and silencing in the liver by qPCR. (left) Raw Ct value and (right) relative fold mRNA expression normalized to mouse Gapdh; comparing the ALIOS-fed PNPLA3^{rs738409-rs738408}+vehicle and PNPLA3^{rs738409-rs738408}+siRNA groups. (C) Analysis of mouse Pnpla3 mRNA expression in liver by qPCR indicates endogenous Pnpla3 is not significantly altered by AAV-mediated over-expression or siRNA silencing. (left) Raw Ct value and (right) relative fold mRNA expression normalized to mouse Gapdh; comparing the chow-fed no-AAV group to the ALIOS-fed PNPLA3^{rs738409-rs738408}+vehicle and PNPLA3^{rs738409-rs738408}+siRNA groups. (D) Hepatic triglyceride content presented as milligrams of triglyceride per gram of liver tissue. Adjusted P values: no AAV+vehicle group, ****<0.0001, AAV-EV+vehicle, *=0.0393, AAV-PNPLA3^{rs738409-rs738408}+SiRNA, **=0.0063. (E) Serum TIMP1 presented as picograms per milliliter of serum. Adjusted P values: no AAV+vehicle group, ****<0.0001, AAV-EV+vehicle, ****<0.0001, AAV-PNPLA3^{rs738409-rs738408}+SiRNA, ****<0.0001. (F) Histological indication of steatosis based on H & E staining, scored as: Within normal limits (0), minimal (1), mild (2), moderate (3), and severe (4). Adjusted P values: no AAV+vehicle group, ****<0.0001, AAV-EV+vehicle, no significance, AAV-PNPLA3^{rs738409-rs738408}+SIR NA, **=0.0012. (G) Histological indication of inflammation based on H & E staining, scored as: Within normal limits (0), minimal (1), mild (2), moderate (3), and severe (4). Adjusted P values: no AAV+vehicle group, ****<0.0001, AAV-EV+vehicle, ****<0.0001, AAV-PNPLA3^{rs738409-rs738408}+SiRNA, ****<0.0001.

[0206] FIGS. 3A-G. To evaluate the ability of a PNPLA3^{rs738409-rs738408}-specific siRNA molecule to prevent further progression of PNPLA3^{rs738409-rs738408}-mediated disease after disease onset, mice received AAV8-empty vector (EV), or AAV8-PNPLA3^{rs738409-rs738408}, or vehicle, and were maintained on a regular chow diet or transitioned to the ALIOS diet. Eight weeks after AAV injections and diet changes, mice were treated with siRNA or vehicle, every other week for eight more weeks; a total of four injection rounds. Mice were harvested at the sixteen-week time point. Although no change was observed in steatosis, if siRNA treatment began after disease induction, several other disease-associated end points were significantly reduced. Results are presented as averages and standard error, N=8 per group. Asterisks represent statistical significance to the AAV8-PNPLA3^{rs738409-rs738408} cohort, generated by One-way ANOVA employing Dunnett's multiple comparisons test. (A) The ratio of liver weight (grams) to body weight (grams) at the time of harvest. Adjusted P values: no AAV+vehicle group, ****<0.0001, AAV-EV+vehicle, not significant, AAV-PNPLA3^{rs738409-rs738408}+siRNA, ***=0.0006. (B) Confirmation of human PNPLA3 mRNA expression and silencing in the liver by qPCR. (left) Raw Ct value and (right) relative fold mRNA expression normalized to mouse Gapdh; comparing the ALIOS-fed PNPLA3^{rs738409-rs738408}+vehicle and PNPLA3^{rs738409-rs738408}+siRNA groups. (C) Analysis of mouse Pnpla3 mRNA expression in liver by qPCR indicates endogenous Pnpla3 is not significantly altered by AAV-mediated over-expression or siRNA silencing. (left) Raw Ct value and (right) relative fold mRNA expression normalized to mouse Gapdh; comparing the chow-fed no-AAV group to the ALIOS-fed PNPLA3^{rs738409-rs738408}+vehicle and PNPLA3^{rs738409-rs738408}+siRNA groups. (D) Hepatic triglyceride content presented as milligrams of triglyceride per gram of liver tissue. Adjusted P values: AAV-EV+vehicle, not significant, AAV-PNPLA3^{rs738409-rs738408}+SIR NA, *=0.0403. (E) Serum TIMP1 presented as picograms per milliliter of serum. Adjusted P values: no AAV+vehicle group, ****<0.0001, AAV-EV+vehicle, *=0.0027, AAV-PNPLA3^{rs738409-rs738408}+siRNA, **=0.002. (F) Histological indication of steatosis based on H&E staining, scored as: Within normal limits (0), minimal (1), mild (2), moderate (3), and severe (4). Adjusted P values: no AAV+vehicle group, ****<0.0001, AAV-EV+vehicle, not significant, AAV-PNPLA3^{rs738409-rs738408}+siRNA, not significant. (G) Histological indication of inflammation based on H& E staining, scored as: Within normal limits (0), minimal (1), mild (2), moderate (3), and severe (4). Adjusted P values: no AAV+vehicle group, ****<0.0001, AAV-EV+vehicle, not significant, AAV-PNPLA3^{rs738409-rs738408}+SiRNA, **=0.0068.

[0207] FIGS. 4A-D. To evaluate the ability of a PNPLA3^{rs738409-rs738408}-specific siRNA molecule to rescue disease-associated phenotypes due to overexpression of

[0208] PNPLA3^{rs738409-rs738408}, liver and serum from ALIOS-fed eight-week AAV8-PNPLA3^{rs738409-rs738408}-vehicle treated mice were compared to livers and serum from ALIOS-fed sixteen-week vehicle- or siRNA-treated AAV8-PNPLA3^{rs738409-rs738408} mice. Although no change was observed in steatosis at this time point with siRNA treatment, hepatic triglyceride, serum TIMP1, and inflammation were all statistically lower at sixteen weeks compared to vehicle controls at eight weeks. Results are presented as averages and standard error, N=8 per group. Asterisks represent statistical significance to the eight-week AAV8-PNPLA3^{rs738409-rs738408} vehicle-treated cohort, generated by One-way ANOVA employing Dunnett's multiple comparisons test. (A) Hepatic triglyceride content presented as milligrams of triglyceride per gram of liver tissue. Adjusted P values: 16WK AAV-PNPLA3^{rs738409-rs738408}+vehicle, not significant; 16WK AAV-PNPLA3^{rs738409-rs738408}+siRNA, **=0.0011. (B) Serum Timp1 presented as picograms per milliliter of serum. Adjusted P values: 16WK AAV-PNPLA3^{rs738409-rs738408}+vehicle, not significant; 16WK AAV-PNPLA3^{rs738409-rs738408}+siRNA, *=0.0134. (C) Histological indication of steatosis based on H & E staining, scored as: Within normal limits (0), minimal (1), mild (2), moderate (3), and severe (4). Adjusted P values: 16WK AAV-PNPLA3^{rs738409-rs738408}+vehicle, not significant; 16WK AAV-PNPLA3^{rs738409-rs738408}+siRNA, not significant. (D) Histological indication of inflammation based on H & E staining, scored as: Within normal limits (0), minimal (1), mild (2), moderate (3), and severe (4). Adjusted P values: 16WK AAV-PNPLA3^{rs738409-rs738408}+vehicle, not significant; 16WK AAV-PNPLA3^{rs738409-rs738408}+siRNA, *=0.0112.

### Example 6: Prevention of Liver Fibrosis by siRNA Molecules in a Humanized PNPLA3^{rs738409-rs738408} Mouse Model

[0209] The “AMLN” diet, developed by Amylin Pharmaceuticals (Clapper 2013), is a modified version of the ALIOS diet. The feed includes a ten-fold increase in cholesterol (2%) and additional sucrose. Mice placed on the “AMLN” diet develop mild to moderate fibrosis after 20-30 weeks (Clapper, Mells and Kristiansen papers). For this study, eight to ten-week old C57BL/6N Crl male mice (Charles River Laboratories Inc.) were injected with AAV-empty vector or AAV-PNPLA3^{rs738409-rs738408}, as described above, to accelerate disease onset. At the time of AAV injection, mice were continued on a normal chow diet or placed on the Envigo diet, TD.170748, complete with drinking water composed of 55% fructose and 45% glucose (Sigma, F0127 and G7021, respectively) until harvest.

[0210] Two weeks post-A A V injection and diet initiation, mice were treated with a single dose of siRNA D-2324 (0.5 mM), via subcutaneous injection, at 5.0 milligrams per kilogram of animal, diluted in phosphate buffered saline (Thermo Fisher Scientific, 14190-136) or a vehicle control. Dosing was repeated biweekly until harvest. At the time of harvest, body weights were collected, followed by serum via cardiac puncture under isoflurane anesthesia, followed by liver weights. The median lobe was fixed via 10% neutral buffered formalin, followed by paraffin processing and embedding. The remainder of the liver was snap frozen for gene expression analysis.

[0211] Snap frozen liver tissue was processed for RNA and gene expression analysis, as described previously. Results are shown as both the raw Ct value and relative mRNA expression of the indicated gene normalized to mouse Gapdh. (TaqMan™ assays from Invitrogen: human PNPLA3, hs00228747_m1; mouse Pnpla3, M m00504420_m1; mouse Col1a1, M 00801666_g1; mouse Col3a1, Mm01254471_g1; Col4a1, Mm01210125_m1; mouse Gapdh, 4352932E). Col1a1, Col3a1 and Col4a1 are extracellular matrix markers associated with hepatic stellate cell activation and liver fibrosis (Baiocchini 2016).

[0212] Formalin-fixed tissues were processed for Hemotoxylin, Eosin, and Masson's Trichrome staining (Dako, CS70030-2, CS70130-2, AR17311-2, respectively) according to the manufacturer's instructions. Anti-Smooth Muscle Actin staining was performed without antigen retrieval and using a DAKO autostainer. Slides were processed using Peroxidazed 1 and Sniper (Biocare, PX 968 and BS966, respectively) and stained with monoclonal anti-Actin, alpha-Smooth Muscle antibody (Sigma, F3777), followed by Rabbit anti-FITC (Invitrogen, 711900), Envision-Rabbit HRP polymer (Dako, K 4003), DAB+ (Dako, K 3468), and Hemotoxylin. Scoring for the amount of steatosis, inflammation, oval cell/bile duct hyperplasia, and aSM A-positive cells was performed by a board-certified pathologist.

[0213] Serum was analyzed for mouse TIMP1 (R&D Systems, MTM 100) and Mouse Cytokeratin 18-M 30 (Cusabio, CSB-E14265m) according to manufacturer's instructions. In addition to TIMP1, Cytokine 18-M 30 has been identified as a potential biomarker for NAFLD/NASH, including early fibrosis (Neuman 2014 and Y ang 2015). FIGS. 5A-L. To evaluate the ability of a PNPLA3^{rs738409-rs738408}-specific siRNA molecule to prevent the development of early fibrosis, mice received A A V 8-empty vector (EV), or AAV8-PNPLA3^{rs738409-rs738408}, or vehicle, and were maintained on a regular chow diet or transitioned to the AMLN diet. Two weeks after AAV injections, mice were treated with siRNA, D-2324, or vehicle, every other week for ten more weeks; a total of six injection rounds. M ice were harvested at the ten-week time point. Results are presented as averages and standard error, Chow-fed no AAV+vehicle and AMLN-fed AAV8-PNPLA3^{rs738409-rs738408}+vehicle, N=8 per group; AMLN-fed AAV8-PNPLA3^{rs738409-rs738408}+vehicle and AAV8-PNPLA3^{rs738409-rs738408}+siRNA, N=12 per group. Asterisks represent statistical significance to the AAV8-PNPLA3^{rs738409-rs738408}-vehicle-treated cohort, generated by One-way ANOVA employing Dunnett's multiple comparisons test. (A) The ratio of liver weight (grams) to body weight (grams) at the time of harvest. A djusted P values: no AAV+vehicle group, ****<0.0001, AAV-EV+vehicle, not significant, AAV-PNPLA3^{rs738409-rs738408}+SiRNA, ****<0.0001. (B) Confirmation of human PNPLA3 mRNA expression and silencing in the liver by qPCR. (left) Raw Ct value and (right) relative fold mRNA expression normalized to mouse Gapdh; comparing the PNPLA3^{rs738409-rs738408}+vehicle and PNPLA3^{rs738409-rs738408}+siRNA groups. (C) Analysis of mouse Pnpla3 mRNA expression in liver by qPCR indicates endogenous Pnpla3 is not significantly altered by AAV-mediated over-expression or SiRNA silencing. (left) Raw Ct value and (right) relative fold mRNA expression normalized to mouse Gapdh; comparing the chow-fed no-AAV group to the AMLN-fed PNPLA3^{rs738409-rs738408}+vehicle and PNPLA3^{rs738409-rs738408}+siRNA groups. (D) Serum Timp1 presented as picograms per milliliter of serum. Adjusted P values: no AAV+vehicle group, ****<0.0001, AAV-EV+vehicle, ****<0.0001, AAV-PNPLA3^{rs738409-rs738408}+SIRNA, ****<0.0001. (E) Serum CK 18m30 presented as picograms per milliliter of serum. Adjusted P values: no AAV+vehicle group, ****<0.0001, AAV-EV+vehicle, ****<0.0001, AAV-PNPLA3^{rs738409-rs738408}+SiRNA, ****<0.0001. (F) Histological indication of inflammation based on H & E staining, scored as: Within normal limits (0), minimal (1), mild (2), moderate (3), and severe (4). Adjusted P values: no AAV+vehicle group, ****<0.0001, AAV-EV+vehicle, *=0.0108, AAV-PNPLA3^{rs738409-rs738408}+SiRNA, ****<0.0001. (G) Histological indication of oval cell/bile duct hyperplasia based on H&E staining, scored as: Within normal limits (0), minimal (1), mild (2), moderate (3), and severe (4). Adjusted P values: no AAV+vehicle group, ****<0.0001, AAV-EV+vehicle, not significant, AAV-PNPLA3^{rs738409-rs738408}+siRNA, **=0.0081. (H) Immunohistochemical staining for anti-Smooth Muscle Actin, scored as: Within normal limits (0), minimal (1), mild (2), moderate (3), and severe (4). Adjusted P values: no AAV+vehicle group, ****<0.0001, AAV-EV+vehicle, *=0.0101, AAV-PNPLA3^{rs738409-rs738408}+SiRNA, ***=0.0002. (I) Masson's Trichrome staining for fibrosis, scored as: Within normal limits (0), minimal (1), mild (2), moderate (3), and severe (4). Adjusted P values: no AAV+vehicle group, ****<0.0001, AAV-EV+vehicle, not significant, AAV-PNPLA3^{rs738409-rs738408}+siRNA, not significant. (J) Mouse Col1a1 mRNA expression in liver by qPCR. Relative fold mRNA expression normalized to mouse Gapdh. Adjusted P values: no AAV+vehicle group, ****<0.0001, AAV-EV+vehicle, ****<0.0001, AAV-PNPLA3^{rs738409-rs738408}+SiRNA, ****<0.0001. (K) Mouse Col3a1 mRNA expression in liver by qPCR. Relative fold mRNA expression normalized to mouse Gapdh. Adjusted P values: no AAV+vehicle group, ****<0.0001, AAV-EV+vehicle, ****<0.0001, AAV-PNPLA3^{rs738409-rs738408}+SiRNA, ****<0.0001. (L) Mouse Col4a1 mRNA expression in liver by qPCR. Relative fold mRNA expression normalized to mouse Gapdh. Adjusted P values: no AAV+vehicle group, ****<0.0001, AAV-EV+vehicle, ***<0.0005, AAV-PNPLA3^{rs738409-rs738408}+SiRNA, <0.0041.

### Example 7: Screening of PNPLA3 siRNA Molecules Using a Bioluminescence Imaging Mouse Model

[0214] BALB/c male mice (Charles River Laboratories Inc.), generally 10-12 weeks of age were injected with Associated adenovirus (AAV; serotype AAVDJ 8; endotoxin-free, prepared internally by Amgen) diluted in phosphate buffered saline (Thermo Fisher Scientific, 14190-136). AAV was administered from 5e11 up to 7.5e11 viral particles per animal and injected intravenously into the tail vein. The AAV constructs were designed with a murine Cytomegalovirus) CM V promoter and a Firefly Luciferase reporter in which, at the 3′ end, a string of nucleotides containing stretches of either the human PNPLA3WT (reference allele) or human PNPLA3^{rs738409-rs738408} (minor allele) siRNA target sequences, and other non-SNP spanning human PNPLA3 target sequences of interest, as detailed in FIGS. 6 and 7.

[0215] Two weeks after AAV injection, mice were injected with RediJect D-Luciferin (PerkinElmer, 770504) according to the manufacturer's instructions. The bioluminescent signal in the mice was captured using an IVIS Spectrum In Vivo Imaging System (PerkinElmer) and analyzed using Living Image Software (PerkinElmer). Mice were then randomized into groups of n=5 based on the total flux [photons/second] signal in the liver region. After randomization into treatment groups, mice were given a single dose of siRNA (0.5 mM) diluted in phosphate buffered saline (Thermo Fisher Scientific, 14190-136). siRNA was administered via subcutaneous injection, at the indicated milligrams per kilogram of animal dose. For every round of screening, and each AAV type, one vehicle-treated control group was included.

[0216] At 1, 2, 3 and 4 weeks post-siRNA injection, mice were re-imaged and total flux [p/s] measurements were collected using the same defined region of interest established for the baseline readings. For each animal, the relative percent knockdown was determined by calculating the percent change in total flux at week 1, 2, 3 or 4 from that animal's total flux at baseline, normalized to the average change in total flux from baseline of the vehicle control group for the same time point. For example, Animal treated with siRNA has relative knockdown calculated as follows: (total flux of animal at week 2)/(total flux of animal at baseline), normalized to the average (total flux of vehicle animals at week 2/total flux of vehicle animals at baseline). Figure FIG. 8 depicts representative images of animals injected with either AAV expressing human PNPLA3 minor allele target sequences or reference allele target sequences, and the change in total flux over time, both before and after siRNA treatment.

TABLE 13
PNPLA3 knockdown assay

| | | AAV | Dose | PNPLA3 | PNPLA3 | PNPLA3 | PNPLA3 | PNPLA3 |
|---|---|---|---|---|---|---|---|---|
| Duplex | | particles/ | administered | knockdown, | knockdown, | knockdown, | knockdown, | knockdown, |
| number | AAV vector | animal | (mg/kg) | Day 8 (%) | Day 15 (%) | Day 22 (%) | Day 29 (%) | Day 43 (%) |
| D-2324 | PNPLA3-I148M DM | 5E+11 | 5 | −98.03 | −94.77 | −94.15 | | −65.40 |
| D-2370 | PNPLA3-I148M DM | 5E+11 | 5 | −96.48 | −96.52 | −95.40 | | −69.31 |
| D-2419 | PNPLA3-I148M DM | 5E+11 | 5 | −97.66 | −97.09 | −96.84 | | −90.52 |
| D-2324 | PNPLA3-I148M DM | 5E+11 | 3 | −96.39 | −91.43 | −87.71 | | −61.75 |
| D-2370 | PNPLA3-I148M DM | 5E+11 | 3 | −97.42 | −95.98 | −95.51 | | −85.66 |
| D-2419 | PNPLA3-I148M DM | 5E+11 | 3 | −97.37 | −95.32 | −95.52 | | −81.81 |
| D-2421 | PNPLA3-I148M DM | 5E+11 | 3 | −96.13 | −93.99 | −95.26 | | −85.49 |
| D-2404 | PNPLA3-I148M DM | 5E+11 | 3 | −97.77 | −96.82 | −96.83 | | |
| D-2402 | PNPLA3-I148M DM | 5E+11 | 3 | −97.69 | −96.69 | −96.81 | | −55.46 |
| D-2472 | PNPLA3-I148M DM | 5E+11 | 3 | −95.89 | −93.61 | −92.05 | | −68.74 |
| D-2443 | PNPLA3-I148M DM | 5E+11 | 3 | −97.33 | −96.51 | −95.82 | | −84.56 |
| D-2466 | PNPLA3-I148M DM | 5E+11 | 3 | −97.96 | −97.13 | −96.75 | | −79.62 |
| D-2473 | PNPLA3-I148M DM | 5E+11 | 3 | −97.18 | −95.95 | −95.79 | | −68.96 |
| D-2324 | PNPLA3-I148M DM | 5E+11 | 1 | −90.86 | −82.53 | −80.56 | | −74.32 |
| D-2370 | PNPLA3-I148M DM | 5E+11 | 1 | −93.49 | −90.34 | −89.17 | | −56.45 |
| D-2419 | PNPLA3-I148M DM | 5E+11 | 1 | −89.12 | −84.16 | −87.52 | | −47.52 |
| D-2421 | PNPLA3-I148M DM | 5E+11 | 1 | −83.03 | −70.41 | −74.45 | | −26.47 |
| D-2404 | PNPLA3-I148M DM | 5E+11 | 1 | −94.34 | −91.18 | −90.01 | | −59.48 |
| D-2402 | PNPLA3-I148M DM | 5E+11 | 1 | −87.41 | −79.59 | −84.95 | | −32.94 |
| D-2472 | PNPLA3-I148M DM | 5E+11 | 1 | −87.28 | −79.86 | −76.77 | | −33.42 |
| D-2443 | PNPLA3-I148M DM | 5E+11 | 1 | −48.96 | −46.63 | −69.39 | | −34.70 |
| D-2466 | PNPLA3-I148M DM | 5E+11 | 1 | −90.36 | −83.03 | −85.21 | | −44.20 |
| D-2473 | PNPLA3-I148M DM | 5E+11 | 1 | −80.89 | −76.26 | −84.45 | | −56.63 |
| D-2454 | PNPLA3 WT | 5E+11 | 3 | −97.89 | −85.94 | −92.41 | | −44.16 |
| D-2453 | PNPLA3 WT | 5E+11 | 3 | −98.67 | −90.86 | −94.56 | | −72.71 |
| D-2456 | PNPLA3 WT | 5E+11 | 3 | −97.75 | −84.03 | −87.90 | | −40.07 |
| D-2455 | PNPLA3 WT | 5E+11 | 3 | −89.75 | −61.34 | −80.50 | | −38.33 |
| D-2454 | PNPLA3 WT | 5E+11 | 1 | −94.43 | −73.24 | −89.57 | | −60.76 |
| D-2453 | PNPLA3 WT | 5E+11 | 1 | −94.15 | −72.63 | −80.99 | | 5.10 |
| D-2456 | PNPLA3 WT | 5E+11 | 1 | −79.90 | −50.52 | −69.95 | | −20.01 |
| D-2455 | PNPLA3 WT | 5E+11 | 1 | −71.82 | −1.32 | −55.65 | | 17.39 |
| D-2419 | PNPLA3-I148M DM | 7.5E+11 | 3 | −98.00 | −97.61 | −96.67 | −91.38 | |
| D-2666 | PNPLA3-I148M DM | 7.5E+11 | 3 | −94.32 | −94.07 | −90.69 | −80.56 | |
| D-2667 | PNPLA3-I148M DM | 7.5E+11 | 3 | −95.49 | −94.77 | −93.58 | −85.70 | |
| D-2676 | PNPLA3-I148M DM | 7.5E+11 | 3 | −94.63 | −91.64 | −89.02 | −72.10 | |
| D-2699 | PNPLA3-I148M DM | 7.5E+11 | 3 | | −90.85 | −85.48 | −57.10 | |
| D-2700 | PNPLA3-I148M DM | 7.5E+11 | 3 | −97.65 | −96.86 | −93.76 | −87.13 | |
| D-2701 | PNPLA3-I148M DM | 7.5E+11 | 3 | −97.37 | −96.59 | −95.00 | −88.29 | |
| D-2705 | PNPLA3-I148M DM | 7.5E+11 | 3 | −95.74 | −91.67 | −86.98 | −75.38 | |
| D-2706 | PNPLA3-I148M DM | 7.5E+11 | 3 | −95.51 | −91.01 | −85.19 | −68.36 | |
| D-2707 | PNPLA3-I148M DM | 7.5E+11 | 3 | −94.33 | −89.29 | −85.91 | −66.08 | |
| D-2708 | PNPLA3-I148M DM | 7.5E+11 | 3 | −97.72 | −96.34 | −95.70 | −89.66 | |
| D-2684 | PNPLA3-I148M DM | 7.5E+11 | 3 | −94.66 | −89.59 | −85.28 | −55.31 | |
| D-2686 | PNPLA3-I148M DM | 7.5E+11 | 3 | −96.29 | −94.61 | −89.34 | −51.49 | |
| D-2688 | PNPLA3-I148M DM | 7.5E+11 | 3 | −95.97 | −94.43 | −93.01 | −82.63 | |
| D-2691 | PNPLA3-I148M DM | 7.5E+11 | 3 | −94.47 | −86.71 | −81.93 | −64.98 | |
| D-2692 | PNPLA3-I148M DM | 7.5E+11 | 3 | −96.52 | −94.01 | −89.97 | −80.83 | |
| D-2696 | PNPLA3-I148M DM | 7.5E+11 | 3 | −96.94 | −94.79 | −92.89 | −83.76 | |
| D-2697 | PNPLA3-I148M DM | 7.5E+11 | 3 | −91.39 | −83.82 | −75.89 | −51.50 | |
| D-2419 | PNPLA3-I148M DM | 7.5E+11 | 3 | −95.52 | −93.54 | −91.46 | −74.42 | |
| D-2523 | PNPLA3-I148M DM | 7.5E+11 | 3 | −94.27 | −91.79 | −66.89 | −50.87 | |
| D-2413 | PNPLA3-I148M DM | 7.5E+11 | 3 | −94.04 | −95.17 | −76.04 | −53.22 | |
| D-2523 | PNPLA3-I148M DM | 7.5E+11 | 1 | −65.61 | −86.75 | 78.32 | 163.55 | |
| D-2413 | PNPLA3-I148M DM | 7.5E+11 | 1 | −83.37 | −85.51 | −26.85 | −9.13 | |
| D-2667 | PNPLA3-I148M DM | 7.5E+11 | 1 | −58.87 | −59.41 | −4.15 | 35.34 | |
| D-2419 | PNPLA3-I148M DM | 7.5E+11 | 1 | −91.58 | −90.56 | −73.21 | −54.90 | |
| D-2688 | PNPLA3-I148M DM | 7.5E+11 | 1 | −73.57 | −84.01 | −37.46 | −1.49 | |
| D-2708 | PNPLA3-I148M DM | 7.5E+11 | 1 | −84.06 | −86.91 | −65.11 | −62.60 | |
| D-2669 | PNPLA3-I148M DM | 7.5E+11 | 1 | −0.36 | 15.49 | 220.82 | 268.45 | |
| D-2711 | PNPLA3-I148M DM | 7.5E+11 | 3 | −0.01 | 49.59 | 238.44 | 212.77 | |
| D-2713 | PNPLA3-I148M DM | 7.5E+11 | 3 | −91.72 | −90.51 | −63.93 | −30.60 | |
| D-2716 | PNPLA3-I148M DM | 7.5E+11 | 3 | −86.43 | −87.62 | −53.78 | −44.36 | |
| D-2674 | PNPLA3-I148M DM | 7.5E+11 | 3 | −80.59 | −81.95 | −36.01 | 0.59 | |
| D-2698 | PNPLA3-I148M DM | 7.5E+11 | 3 | −85.22 | −71.73 | 483.18 | 807.64 | |
| D-2693 | PNPLA3-I148M DM | 7.5E+11 | 3 | −75.98 | −59.22 | 39.49 | 110.57 | |
| D-2456 | PNPLA3 WT | 7.5E+11 | 3 | −85.45 | −78.57 | −73.40 | −58.06 | |
| D-2523 | PNPLA3 WT | 7.5E+11 | 3 | −27.40 | −30.01 | −40.22 | −49.59 | |
| D-2413 | PNPLA3 WT | 7.5E+11 | 3 | −36.68 | −27.93 | −10.77 | 12.54 | |
| D-2419 | PNPLA3 WT | 7.5E+11 | 3 | 115.08 | 100.96 | 101.39 | 64.16 | |
| D-2679 | PNPLA3 WT | 7.5E+11 | 3 | −34.16 | −6.82 | 17.45 | 17.46 | |
| D-2688 | PNPLA3 WT | 7.5E+11 | 3 | 135.68 | 67.66 | 73.67 | 48.09 | |
| D-2708 | PNPLA3 WT | 7.5E+11 | 3 | 69.43 | 40.96 | 50.89 | 52.15 | |
| D-2669 | PNPLA3 WT | 7.5E+11 | 3 | 189.68 | 50.72 | 148.32 | 147.67 | |
| D-2711 | PNPLA3 WT | 7.5E+11 | 3 | 109.67 | 114.26 | 75.39 | 93.47 | |
| D-2713 | PNPLA3 WT | 7.5E+11 | 3 | 115.32 | 48.86 | 18.67 | 1.36 | |
| D-2716 | PNPLA3 WT | 7.5E+11 | 3 | 205.93 | 114.38 | 114.09 | 83.88 | |
| D-2674 | PNPLA3 WT | 7.5E+11 | 3 | 81.00 | 67.18 | 109.44 | 65.24 | |
| D-2698 | PNPLA3 WT | 7.5E+11 | 3 | 105.88 | 76.39 | 62.37 | 37.65 | |
| D-2693 | PNPLA3 WT | 7.5E+11 | 3 | 148.52 | 125.48 | 116.64 | 61.43 | |
| D-2690 | PNPLA3 WT | 7.5E+11 | 3 | 260.84 | 226.65 | 132.56 | 143.47 | |
| D-2419 | PNPLA3-I148M DM | 7.5E+11 | 1 | −93.56 | −89.52 | −84.43 | −63.34 | |
| D-2717 | PNPLA3-I148M DM | 7.5E+11 | 1 | −80.51 | −67.95 | −58.97 | −22.43 | |
| D-2718 | PNPLA3-I148M DM | 7.5E+11 | 1 | −71.69 | −55.51 | −36.08 | 38.24 | |
| D-2721 | PNPLA3-I148M DM | 7.5E+11 | 1 | −63.71 | −62.50 | −48.52 | −12.97 | |
| D-2719 | PNPLA3-I148M DM | 7.5E+11 | 1 | −78.95 | −70.97 | −65.38 | −13.45 | |
| D-2713 | PNPLA3-I148M DM | 7.5E+11 | 1 | −70.43 | −64.51 | −43.23 | −0.48 | |
| D-2712 | PNPLA3-I148M DM | 7.5E+11 | 1 | −79.63 | −68.64 | −51.82 | −8.94 | |
| D-2720 | PNPLA3-I148M DM | 7.5E+11 | 1 | −65.95 | −86.70 | −40.92 | 2.24 | |
| D-2722 | PNPLA3-I148M DM | 7.5E+11 | 1 | −80.32 | −75.04 | −63.28 | −34.56 | |
| D-2723 | PNPLA3-I148M DM | 7.5E+11 | 1 | −72.69 | −55.59 | −39.98 | 35.01 | |
| D-2724 | PNPLA3-I148M DM | 7.5E+11 | 1 | −87.97 | −78.29 | −73.04 | −42.89 | |
| D-2725 | PNPLA3-I148M DM | 7.5E+11 | 1 | −79.65 | −70.69 | −32.50 | −35.65 | |
| D-2726 | PNPLA3-I148M DM | 7.5E+11 | 1 | −40.03 | −38.86 | −14.74 | 55.71 | |
| D-2716 | PNPLA3-I148M DM | 7.5E+11 | 1 | 34.75 | 92.81 | 181.00 | 440.62 | |
| D-2454 | PNPLA3 WT | 7.5E+11 | 3 | −98.16 | −95.32 | −90.10 | −88.50 | |
| D-2523 | PNPLA3 WT | 7.5E+11 | 3 | −44.09 | −18.41 | 133.97 | 45.50 | |
| D-2413 | PNPLA3 WT | 7.5E+11 | 3 | −64.12 | −40.89 | 38.07 | −3.05 | |
| D-2717 | PNPLA3 WT | 7.5E+11 | 3 | −47.67 | −19.71 | 109.49 | 42.75 | |
| D-2718 | PNPLA3 WT | 7.5E+11 | 3 | −77.04 | −60.05 | −3.84 | −40.18 | |
| D-2721 | PNPLA3 WT | 7.5E+11 | 3 | −47.41 | −49.33 | 10.37 | −41.12 | |
| D-2719 | PNPLA3 WT | 7.5E+11 | 3 | −29.15 | −27.68 | 72.52 | −20.99 | |
| D-2720 | PNPLA3 WT | 7.5E+11 | 3 | −67.46 | −46.37 | 66.09 | −20.66 | |
| D-2726 | PNPLA3 WT | 7.5E+11 | 3 | −83.36 | −81.38 | −37.21 | −61.84 | |
| D-2723 | PNPLA3 WT | 7.5E+11 | 3 | −76.09 | −57.32 | −7.17 | −45.85 | |
| D-2419 | PNPLA3-I148M DM | 7.5E+11 | 3 | −96.66 | −97.62 | −93.93 | −88.77 | |
| D-2765 | PNPLA3-I148M DM | 7.5E+11 | 3 | −96.64 | −97.81 | −95.29 | −87.53 | |
| D-2766 | PNPLA3-I148M DM | 7.5E+11 | 3 | −97.30 | −98.15 | −95.74 | −90.07 | |
| D-2724 | PNPLA3-I148M DM | 7.5E+11 | 3 | −97.41 | −97.40 | −94.77 | −74.92 | |
| D-2768 | PNPLA3-I148M DM | 7.5E+11 | 3 | −93.09 | −95.62 | −90.36 | −74.62 | |
| D-2769 | PNPLA3-I148M DM | 7.5E+11 | 3 | −96.94 | −97.93 | −95.17 | −89.60 | |
| D-2770 | PNPLA3-I148M DM | 7.5E+11 | 3 | −89.23 | −94.14 | −90.41 | −79.60 | |
| D-2771 | PNPLA3-I148M DM | 7.5E+11 | 3 | −97.22 | −97.80 | −95.95 | −90.02 | |
| D-2772 | PNPLA3-I148M DM | 7.5E+11 | 3 | −97.47 | −97.84 | −95.09 | −92.03 | |
| D-2773 | PNPLA3-I148M DM | 7.5E+11 | 3 | −97.51 | −97.95 | −96.18 | −93.12 | |
| D-2774 | PNPLA3-I148M DM | 7.5E+11 | 3 | −96.78 | −97.86 | −95.36 | −91.98 | |
| D-2413 | PNPLA3-I148M DM | 7.5E+11 | 3 | −97.94 | −98.01 | −96.24 | −91.62 | |
| D-2419 | PNPLA3-I148M DM | 7.5E+11 | 3 | −95.82 | −97.64 | −93.55 | −89.59 | |
| D-2717 | PNPLA3-I148M DM | 7.5E+11 | 3 | −96.64 | −97.39 | −95.19 | −90.49 | |
| D-2453 | PNPLA3 WT | 7.5E+11 | 1.5 | −94.74 | −92.67 | −88.92 | −82.19 | |
| D-2724 | PNPLA3 WT | 7.5E+11 | 3 | 20.64 | 74.00 | 49.42 | 77.34 | |
| D-2522 | PNPLA3 WT | 7.5E+11 | 3 | −27.08 | 53.78 | 58.28 | 17.26 | |
| D-2765 | PNPLA3 WT | 7.5E+11 | 3 | −65.40 | −34.32 | −35.49 | −46.32 | |
| D-2766 | PNPLA3 WT | 7.5E+11 | 3 | −11.64 | 30.74 | 34.37 | 27.78 | |
| D-2767 | PNPLA3 WT | 7.5E+11 | 3 | 14.66 | 60.91 | 75.79 | 39.35 | |
| D-2768 | PNPLA3 WT | 7.5E+11 | 3 | 50.61 | 196.44 | 345.66 | 149.29 | |
| D-2769 | PNPLA3 WT | 7.5E+11 | 3 | 30.51 | 68.93 | 90.25 | 35.98 | |
| D-2770 | PNPLA3 WT | 7.5E+11 | 3 | 25.01 | 69.81 | 95.00 | 99.26 | |
| D-2771 | PNPLA3 WT | 7.5E+11 | 3 | 60.93 | 158.57 | 281.70 | 147.49 | |
| D-2772 | PNPLA3 WT | 7.5E+11 | 3 | −3.32 | 58.08 | 89.41 | 85.72 | |
| D-2773 | PNPLA3 WT | 7.5E+11 | 3 | −36.28 | −20.77 | 21.91 | −22.36 | |
| D-2774 | PNPLA3 WT | 7.5E+11 | 3 | 2.83 | 51.07 | 71.49 | 65.75 | |
| D-2413 | PNPLA3 WT | 7.5E+11 | 3 | −5.20 | 44.59 | 50.74 | 28.08 | |
| D-2419 | PNPLA3 WT | 7.5E+11 | 3 | 101.03 | 115.15 | 32.98 | −16.47 | |
| D-2717 | PNPLA3 WT | 7.5E+11 | 1.5 | 21.80 | 107.39 | 173.59 | 87.94 | |

### Example 8: Efficacy Confirmation of a PNPLA3^{rs/38409-rs738408}-Selective siRNA Molecule in a Chimeric Humanized Liver Mouse Model

[0217] To evaluate the efficacy of a PNPLA3 minor-allele selective siRNA in human hepatocytes in vivo, chimeric humanized liver PXB-mice from PhoenixBio Co., Ltd (Japan) were used (Miyamoto et al. (2017) Xenobiotica 47(12):1052-1063; Tateno et al. (2015) PLOS One 10(11):e0142145. doi:10.1371/journal.pone.0142145). At the time of study initiation, the male mice were approximately four months old; at least three months post-transplant. The mice were determined, by PhoenixBio, to have a human hepatocyte replacement index of 90-95% and, based on previous genotyping, were heterozygous for PNPLA3^{rs738409} (Lot BD195) . Upon arrival, mice were placed on ProLab RMH 3000 chow, as recommended by PhoenixBio. After a one-week acclimation period, the diet was switched to a high fat-fructose-rich NASH-inducing diet (Research Diets, D 19021301). After one week on the NASH diet, mice were randomized based on body weight measurements. Mice were treated with a single dose of siRNA (0.5 mM), via subcutaneous injection, at 3.0 or 10.0 milligrams per kilogram of animal, diluted in phosphate buffered saline (Thermo Fisher Scientific, 14190-136), or received vehicle only. At two- or four-weeks post-siRNA injection, livers were collected from the animals, snap frozen in liquid nitrogen, processed for purified RNA using a QIA cube Automated DNA/RNA Isolation Purification System (Qiagen) and RNeasy Mini QIAcube Kit (Qiagen, 74116) according to manufacturer's instructions. Samples were analyzed using a NanoDrop™ 8000 Spectrophotometer (Thermo Scientific, ND-8000-GL). RNA was treated with RQ1 RN ase-Free DN ase (Promega, M 6101) and prepared for Digital Droplet PCR (ddPCR) according to the manufacturer's instructions. AccuScript High Fidelity 1st Strand cDNA Synthesis Kit (Thermo Fisher, 200820) was used for the reverse transcription reaction and the PCR reactions were assembled using ddPCR Supermix for Probes (BioRad, 1863010). ddPCR was performed using an AutoDG droplet digital PCR system (BioRad, QX200). The following TaqMan™ assays were purchased from Invitrogen: human PNPLA3 (Hs00228747_m1), human ASGR1 (Hs1005019_m1), mouse Asgr1 (M m01245581_m1), and a human PNPLA3 rs738409 minor/reference allele discrimination assay (C______7241_10). The following assays were purchased from Integrated DNA Technologies Inc.: human TBP (Hs. PT 53a.20105486; primer to probe ratio 3.6:1), human HPRT1 (Hs.PT.39a.22214821; primer to probe ratio 3.6:1), and mouse Hprt (Mm.PT.39a.22214828; primer to probe ratio 3.6:1). Results for human PNPLA3, HPRT and ASGR1, and mouse Hprt and Asgr1, are presented as copies per 20 microliter reaction, normalized to human TBP. The data for human PNPLA3, human HPRT and mouse Hprt is also presented as the relative percent knockdown of mRNA expression compared to that of vehicle-treated control animals.

[0218] For hepatic triglyceride content analysis, approximately 0.05-0.1 milligrams of frozen liver from the mice were homogenized in one milliliter of isopropanol. After one hour of incubation on ice, samples were spun at 10,000 rpm in a microfuge, and supernatants transferred to a clean deep-well 96-well plate. Triglyceride content was determined using the colorimetric Infinity Triglyceride Reagent (Thermo Fisher Scientific, TR22421) and Triglyceride Standard (Pointe Scientific, T7531-STD) according to manufacturer's instructions, and a SpectraMax Plus microplate reader with SoftMax Pro6 software (Molecular Devices). Results are presented as milligrams of triglyceride per gram of liver tissue.

[0219] Figure FIG. 9 shows an example of siRNA molecule, D-2419, demonstrating both dose-dependent and allele-selective mRNA knockdown and functional efficacy in vivo. Following one week of a NASH-diet, mice heterozygous for human PNPLA3^{rs738409-rs738408} were treated with SiRNA or vehicle. (A) siRNA molecule, D-2419, was injected at 3.0 and 10.0 milligrams per kilogram of body weight subcutaneously into the abdomen of the mouse. Two and four weeks after siRNA treatment, mice were sacrificed, and the livers were collected and processed for analysis. Using ddPCR and an allele-specific TaqMan® two-dye reagent to discriminate the minor versus reference alleles for PNPLA3, the data demonstrates both dose-dependent and allele-selective knockdown of PNPLA3^{rs738409-rs738408} and no measurable change of PNPLA3^{WT}. N=5 mice per group; data is presented as the average value and the standard error of the mean. Two-way ANOVA, **0.001, ***<0.001, ****<0.0001, NS=not significant. (B) The data represents the average relative percent mRNA knockdown, and standard error of the mean, of the human PNPLA3^{rs738409-rs738408} allele verses PNPLA3^{WT} set to the vehicle-treated control group. Values are relative to the two-week vehicle control average value, all normalized to human TBP. (C) Livers from the two-week treatment group were processed for triglyceride content to evaluate functional efficacy. The data represents the milligrams of triglyceride per gram of liver. N=5 mice per group; data is presented as the average value and the standard error of the mean. One-way ANOVA, **0.01, NS=not significant. (D) To control for efficient GalNAc-mediated delivery of siRNA, D-2787, a siRNA cross-reactive for human and mouse HPRT and Hprt, respectively, was delivered at 10 milligrams per kilogram and the livers harvested after two weeks. The data represents the copies of HPRT mRNA and Hprt mRNA in D-2787-treated (N=4) versus vehicle-treated (N=5) mice. The data is presented as the average value and the standard error of the mean. One-way ANOVA, *0.01. (E) The data represents the average relative percent mRNA knockdown, and standard error of the mean, of human HPRT and mouse Hprt mRNA, respectively, set to the vehicle-treated control group; all normalized to human TBP. (F) To confirm expression of GalNAc receptor on the hepatocytes of PXB Mice®, mouse Asgr1 mRNA and human ASGR1 mRNA levels were evaluated in the absence and presence of D-2419, at both two-weeks and four-weeks post-siRNA injection. N=5 mice per group; the data is presented as the average value and the standard error of the mean.

The application's sequence listing, which the Patent Office published only in electronic form, follows.

SEQUENCE LISTING (3346 sequences)

SEQ ID NO: 1 - RNA, 21 nt, synthetic construct
  misc_feature 1..21: note = source = /note="Description of Artificial Sequence: Synthetic oligonucleotide"
  source 1..21: mol_type = other RNA
gggcaataaagtacctgcttt

SEQ ID NO: 2 - RNA, 21 nt, synthetic construct
  misc_feature 1..21: note = source = /note="Description of Artificial Sequence: Synthetic oligonucleotide"
  source 1..21: mol_type = other RNA
agcaggtactttattgccctt

SEQ ID NO: 3 - RNA, 21 nt, synthetic construct
  misc_feature 1..21: note = source = /note="Description of Artificial Sequence: Synthetic oligonucleotide"
  source 1..21: mol_type = other RNA
cggccaatgtccaccagcttt

SEQ ID NO: 4 - RNA, 21 nt, synthetic construct
  misc_feature 1..21: note = source = /note="Description of Artificial Sequence: Synthetic oligonucleotide"
  source 1..21: mol_type = other RNA
agctggtggacattggccgtt

SEQ ID NO: 5 - RNA, 21 nt, synthetic construct
  misc_feature 1..21: note = source = /note="Description of Artificial Sequence: Synthetic oligonucleotide"
  source 1..21: mol_type = other RNA
ggtccagcctgaacttctttt

SEQ ID NO: 6 - RNA, 21 nt, synthetic construct
  misc_feature 1..21: note = source = /note="Description of Artificial Sequence: Synthetic oligonucleotide"
  source 1..21: mol_type = other RNA
aagaagttcaggctggacctt

SEQ ID NO: 7 - RNA, 21 nt, synthetic construct
  misc_feature 1..21: note = source = /note="Description of Artificial Sequence: Synthetic oligonucleotide"
  source 1..21: mol_type = other RNA
gcttcatccccttctacagtt

SEQ ID NO: 8 - RNA, 21 nt, synthetic construct
  misc_feature 1..21: note = source = /note="Description of Artificial Sequence: Synthetic oligonucleotide"
  source 1..21: mol_type = other RNA
ctgtagaaggggatgaagctt

SEQ ID NO: 9 - RNA, 21 nt, synthetic construct
  misc_feature 1..21: note = source = /note="Description of Artificial Sequence: Synthetic oligonucleotide"
  source 1..21: mol_type = other RNA
gcggcttcctgggcttctatt

SEQ ID NO: 10 - RNA, 21 nt, synthetic construct
  misc_feature 1..21: note = source = /note="Description of Artificial Sequence: Synthetic oligonucleotide"
  source 1..21: mol_type = other RNA
tagaagcccaggaagccgctt

SEQ ID NO: 11 - RNA, 21 nt, synthetic construct
  misc_feature 1..21: note = source = /note="Description of Artificial Sequence: Synthetic oligonucleotide"
  source 1..21: mol_type = other RNA
gcctctgagctgagttggttt

SEQ ID NO: 12 - RNA, 21 nt, synthetic construct
  misc_feature 1..21: note = source = /note="Description of Artificial Sequence: Synthetic oligonucleotide"
  source 1..21: mol_type = other RNA
accaactcagctcagaggctt

SEQ ID NO: 13 - RNA, 21 nt, synthetic construct
  misc_feature 1..21: note = source = /note="Description of Artificial Sequence: Synthetic oligonucleotide"
  source 1..21: mol_type = other RNA
gtgacaacgtacccttcattt

SEQ ID NO: 14 - RNA, 21 nt, synthetic construct
  misc_feature 1..21: note = source = /note="Description of Artificial Sequence: Synthetic oligonucleotide"
  source 1..21: mol_type = other RNA
atgaagggtacgttgtcactt

SEQ ID NO: 15 - RNA, 21 nt, synthetic construct
  misc_feature 1..21: note = source = /note="Description of Artificial Sequence: Synthetic oligonucleotide"
  source 1..21: mol_type = other RNA
cccgcctccaggtcccaaatt

SEQ ID NO: 16 - RNA, 21 nt, synthetic construct
  misc_feature 1..21: note = source = /note="Description of Artificial Sequence: Synthetic oligonucleotide"
  source 1..21: mol_type = other RNA
tttgggacctggaggcgggtt

SEQ ID NO: 17 - RNA, 21 nt, synthetic construct
  misc_feature 1..21: note = source = /note="Description of Artificial Sequence: Synthetic oligonucleotide"
  source 1..21: mol_type = other RNA
cttcatccccttctacagttt

SEQ ID NO: 18 - RNA, 21 nt, synthetic construct
  misc_feature 1..21: note = source = /note="Description of Artificial Sequence: Synthetic oligonucleotide"
  source 1..21: mol_type = other RNA
actgtagaaggggatgaagtt

SEQ ID NO: 19 - RNA, 21 nt, synthetic construct
  misc_feature 1..21: note = source = /note="Description of Artificial Sequence: Synthetic oligonucleotide"
  source 1..21: mol_type = other RNA
ggtatgttcctgcttcatgtt

SEQ ID NO: 20 - RNA, 21 nt, synthetic construct
  misc_feature 1..21: note = source = /note="Description of Artificial Sequence: Synthetic oligonucleotide"
  source 1..21: mol_type = other RNA
catgaagcaggaacatacctt

SEQ ID NO: 21 - RNA, 21 nt, synthetic construct
  misc_feature 1..21: note = source = /note="Description of Artificial Sequence: Synthetic oligonucleotide"
  source 1..21: mol_type = other RNA
gtatgttcctgcttcatgctt

SEQ ID NO: 22 - RNA, 21 nt, synthetic construct
  misc_feature 1..21: note = source = /note="Description of Artificial Sequence: Synthetic oligonucleotide"
  source 1..21: mol_type = other RNA
gcatgaagcaggaacatactt

SEQ ID NO: 23 - RNA, 21 nt, synthetic construct
  misc_feature 1..21: note = source = /note="Description of Artificial Sequence: Synthetic oligonucleotide"
  source 1..21: mol_type = other RNA
tatgttcctgcttcatgcctt

SEQ ID NO: 24 - RNA, 21 nt, synthetic construct
  misc_feature 1..21: note = source = /note="Description of Artificial Sequence: Synthetic oligonucleotide"
  source 1..21: mol_type = other RNA
ggcatgaagcaggaacatatt

SEQ ID NO: 25 - RNA, 21 nt, synthetic construct
  misc_feature 1..21: note = source = /note="Description of Artificial Sequence: Synthetic oligonucleotide"
  source 1..21: mol_type = other RNA
atgttcctgcttcatgccctt

SEQ ID NO: 26 - RNA, 21 nt, synthetic construct
  misc_feature 1..21: note = source = /note="Description of Artificial Sequence: Synthetic oligonucleotide"
  source 1..21: mol_type = other RNA
gggcatgaagcaggaacattt

SEQ ID NO: 27 - RNA, 21 nt, synthetic construct
  misc_feature 1..21: note = source = /note="Description of Artificial Sequence: Synthetic oligonucleotide"
  source 1..21: mol_type = other RNA
tgttcctgcttcatgcccttt

SEQ ID NO: 28 - RNA, 21 nt, synthetic construct
  misc_feature 1..21: note = source = /note="Description of Artificial Sequence: Synthetic oligonucleotide"
  source 1..21: mol_type = other RNA
agggcatgaagcaggaacatt

SEQ ID NO: 29 - RNA, 21 nt, synthetic construct
  misc_feature 1..21: note = source = /note="Description of Artificial Sequence: Synthetic oligonucleotide"
  source 1..21: mol_type = other RNA
gttcctgcttcatgccctttt

SEQ ID NO: 30 - RNA, 21 nt, synthetic construct
  misc_feature 1..21: note = source = /note="Description of Artificial Sequence: Synthetic oligonucleotide"
  source 1..21: mol_type = other RNA
aagggcatgaagcaggaactt

SEQ ID NO: 31 - RNA, 21 nt, synthetic construct
  misc_feature 1..21: note = source = /note="Description of Artificial Sequence: Synthetic oligonucleotide"
  source 1..21: mol_type = other RNA
ttcctgcttcatgcccttctt

SEQ ID NO: 32 - RNA, 21 nt, synthetic construct
  misc_feature 1..21: note = source = /note="Description of Artificial Sequence: Synthetic oligonucleotide"
  source 1..21: mol_type = other RNA
gaagggcatgaagcaggaatt

SEQ ID NO: 33 - RNA, 21 nt, synthetic construct
  misc_feature 1..21: note = source = /note="Description of Artificial Sequence: Synthetic oligonucleotide"
  source 1..21: mol_type = other RNA
tcctgcttcatgcccttcttt

SEQ ID NO: 34 - RNA, 21 nt, synthetic construct
  misc_feature 1..21: note = source = /note="Description of Artificial Sequence: Synthetic oligonucleotide"
  source 1..21: mol_type = other RNA
agaagggcatgaagcaggatt

SEQ ID NO: 35 - RNA, 21 nt, synthetic construct
  misc_feature 1..21: note = source = /note="Description of Artificial Sequence: Synthetic oligonucleotide"
  source 1..21: mol_type = other RNA
cctgcttcatgcccttctatt

SEQ ID NO: 36 - RNA, 21 nt, synthetic construct
  misc_feature 1..21: note = source = /note="Description of Artificial Sequence: Synthetic oligonucleotide"
  source 1..21: mol_type = other RNA
tagaagggcatgaagcaggtt

SEQ ID NO: 37 - RNA, 21 nt, synthetic construct
  misc_feature 1..21: note = source = /note="Description of Artificial Sequence: Synthetic oligonucleotide"
  source 1..21: mol_type = other RNA
ctgcttcatgcccttctactt

SEQ ID NO: 38 - RNA, 21 nt, synthetic construct
  misc_feature 1..21: note = source = /note="Description of Artificial Sequence: Synthetic oligonucleotide"
  source 1..21: mol_type = other RNA
gtagaagggcatgaagcagtt

SEQ ID NO: 39 - RNA, 21 nt, synthetic construct
  misc_feature 1..21: note = source = /note="Description of Artificial Sequence: Synthetic oligonucleotide"
  source 1..21: mol_type = other RNA
tgcttcatgcccttctacatt

SEQ ID NO: 40 - RNA, 21 nt, synthetic construct
  misc_feature 1..21: note = source = /note="Description of Artificial Sequence: Synthetic oligonucleotide"
  source 1..21: mol_type = other RNA
tgtagaagggcatgaagcatt

SEQ ID NO: 41 - RNA, 21 nt, synthetic construct
  misc_feature 1..21: note = source = /note="Description of Artificial Sequence: Synthetic oligonucleotide"
  source 1..21: mol_type = other RNA
gcttcatgcccttctacagtt

SEQ ID NO: 42 - RNA, 21 nt, synthetic construct
  misc_feature 1..21: note = source = /note="Description of Artificial Sequence: Synthetic oligonucleotide"
  source 1..21: mol_type = other RNA
ctgtagaagggcatgaagctt

SEQ ID NO: 43 - RNA, 21 nt, synthetic construct
  misc_feature 1..21: note = source = /note="Description of Artificial Sequence: Synthetic oligonucleotide"
  source 1..21: mol_type = other RNA
cttcatgcccttctacagttt

SEQ ID NO: 44 - RNA, 21 nt, synthetic construct
  misc_feature 1..21: note = source = /note="Description of Artificial Sequence: Synthetic oligonucleotide"
  source 1..21: mol_type = other RNA
actgtagaagggcatgaagtt

SEQ ID NO: 45 - RNA, 21 nt, synthetic construct
  misc_feature 1..21: note = source = /note="Description of Artificial Sequence: Synthetic oligonucleotide"
  source 1..21: mol_type = other RNA
ttcatgcccttctacagtgtt

SEQ ID NO: 46 - RNA, 21 nt, synthetic construct
  misc_feature 1..21: note = source = /note="Description of Artificial Sequence: Synthetic oligonucleotide"
  source 1..21: mol_type = other RNA
cactgtagaagggcatgaatt

SEQ ID NO: 47 - RNA, 21 nt, synthetic construct
  misc_feature 1..21: note = source = /note="Description of Artificial Sequence: Synthetic oligonucleotide"
  source 1..21: mol_type = other RNA
tcatgcccttctacagtggtt

SEQ ID NO: 48 - RNA, 21 nt, synthetic construct
  misc_feature 1..21: note = source = /note="Description of Artificial Sequence: Synthetic oligonucleotide"
  source 1..21: mol_type = other RNA
ccactgtagaagggcatgatt

SEQ ID NO: 49 - RNA, 21 nt, synthetic construct
  misc_feature 1..21: note = source = /note="Description of Artificial Sequence: Synthetic oligonucleotide"
  source 1..21: mol_type = other RNA
catgcccttctacagtggctt

SEQ ID NO: 50 - RNA, 21 nt, synthetic construct
  misc_feature 1..21: note = source = /note="Description of Artificial Sequence: Synthetic oligonucleotide"
  source 1..21: mol_type = other RNA
gccactgtagaagggcatgtt

SEQ ID NO: 51 - RNA, 21 nt, synthetic construct
  misc_feature 1..21: note = source = /note="Description of Artificial Sequence: Synthetic oligonucleotide"
  source 1..21: mol_type = other RNA
atgcccttctacagtggcctt

SEQ ID NO: 52 - RNA, 21 nt, synthetic construct
  misc_feature 1..21: note = source = /note="Description of Artificial Sequence: Synthetic oligonucleotide"
  source 1..21: mol_type = other RNA
ggccactgtagaagggcattt

SEQ ID NO: 53 - RNA, 21 nt, synthetic construct
  misc_feature 1..21: note = source = /note="Description of Artificial Sequence: Synthetic oligonucleotide"
  source 1..21: mol_type = other RNA
tgcccttctacagtggccttt

SEQ ID NO: 54 - RNA, 21 nt, synthetic construct
  misc_feature 1..21: note = source = /note="Description of Artificial Sequence: Synthetic oligonucleotide"
  source 1..21: mol_type = other RNA
aggccactgtagaagggcatt

SEQ ID NO: 55 - RNA, 21 nt, synthetic construct
  misc_feature 1..21: note = source = /note="Description of Artificial Sequence: Synthetic oligonucleotide"
  source 1..21: mol_type = other RNA
gcccttctacagtggcctttt

SEQ ID NO: 56 - RNA, 21 nt, synthetic construct
  misc_feature 1..21: note = source = /note="Description of Artificial Sequence: Synthetic oligonucleotide"
  source 1..21: mol_type = other RNA
aaggccactgtagaagggctt

SEQ ID NO: 57 - RNA, 21 nt, synthetic construct
  misc_feature 1..21: note = source = /note="Description of Artificial Sequence: Synthetic oligonucleotide"
  source 1..21: mol_type = other RNA
ggtatgttcctgcttcatctt

SEQ ID NO: 58 - RNA, 21 nt, synthetic construct
  misc_feature 1..21: note = source = /note="Description of Artificial Sequence: Synthetic oligonucleotide"
  source 1..21: mol_type = other RNA
gatgaagcaggaacatacctt

SEQ ID NO: 59 - RNA, 21 nt, synthetic construct
  misc_feature 1..21: note = source = /note="Description of Artificial Sequence: Synthetic oligonucleotide"
  source 1..21: mol_type = other RNA
gtatgttcctgcttcatcctt

SEQ ID NO: 60 - RNA, 21 nt, synthetic construct
  misc_feature 1..21: note = source = /note="Description of Artificial Sequence: Synthetic oligonucleotide"
  source 1..21: mol_type = other RNA
ggatgaagcaggaacatactt

SEQ ID NO: 61 - RNA, 21 nt, synthetic construct
  misc_feature 1..21: note = source = /note="Description of Artificial Sequence: Synthetic oligonucleotide"
  source 1..21: mol_type = other RNA
tatgttcctgcttcatccctt

SEQ ID NO: 62 - RNA, 21 nt, synthetic construct
  misc_feature 1..21: note = source = /note="Description of Artificial Sequence: Synthetic oligonucleotide"
  source 1..21: mol_type = other RNA
gggatgaagcaggaacatatt

SEQ ID NO: 63 - RNA, 21 nt, synthetic construct
  misc_feature 1..21: note = source = /note="Description of Artificial Sequence: Synthetic oligonucleotide"
  source 1..21: mol_type = other RNA
atgttcctgcttcatcccctt

SEQ ID NO: 64 - RNA, 21 nt, synthetic construct
  misc_feature 1..21: note = source = /note="Description of Artificial Sequence: Synthetic oligonucleotide"
  source 1..21: mol_type = other RNA
ggggatgaagcaggaacattt

SEQ ID NO: 65 - RNA, 21 nt, synthetic construct
  misc_feature 1..21: note = source = /note="Description of Artificial Sequence: Synthetic oligonucleotide"
  source 1..21: mol_type = other RNA
tgttcctgcttcatccccttt

SEQ ID NO: 66 - RNA, 21 nt, synthetic construct
  misc_feature 1..21: note = source = /note="Description of Artificial Sequence: Synthetic oligonucleotide"
  source 1..21: mol_type = other RNA
aggggatgaagcaggaacatt

SEQ ID NO: 67 - RNA, 21 nt, synthetic construct
  misc_feature 1..21: note = source = /note="Description of Artificial Sequence: Synthetic oligonucleotide"
  source 1..21: mol_type = other RNA
gttcctgcttcatcccctttt

SEQ ID NO: 68 - RNA, 21 nt, synthetic construct
  misc_feature 1..21: note = source = /note="Description of Artificial Sequence: Synthetic oligonucleotide"
  source 1..21: mol_type = other RNA
aaggggatgaagcaggaactt

SEQ ID NO: 69 - RNA, 21 nt, synthetic construct
  misc_feature 1..21: note = source = /note="Description of Artificial Sequence: Synthetic oligonucleotide"
  source 1..21: mol_type = other RNA
ttcctgcttcatccccttctt

SEQ ID NO: 70 - RNA, 21 nt, synthetic construct
  misc_feature 1..21: note = source = /note="Description of Artificial Sequence: Synthetic oligonucleotide"
  source 1..21: mol_type = other RNA
gaaggggatgaagcaggaatt

SEQ ID NO: 71 - RNA, 21 nt, synthetic construct
  misc_feature 1..21: note = source = /note="Description of Artificial Sequence: Synthetic oligonucleotide"
  source 1..21: mol_type = other RNA
tcctgcttcatccccttcttt

SEQ ID NO: 72 - RNA, 21 nt, synthetic construct
  misc_feature 1..21: note = source = /note="Description of Artificial Sequence: Synthetic oligonucleotide"
  source 1..21: mol_type = other RNA
agaaggggatgaagcaggatt

SEQ ID NO: 73 - RNA, 21 nt, synthetic construct
  misc_feature 1..21: note = source = /note="Description of Artificial Sequence: Synthetic oligonucleotide"
  source 1..21: mol_type = other RNA
cctgcttcatccccttctatt

SEQ ID NO: 74 - RNA, 21 nt, synthetic construct
  misc_feature 1..21: note = source = /note="Description of Artificial Sequence: Synthetic oligonucleotide"
  source 1..21: mol_type = other RNA
tagaaggggatgaagcaggtt

SEQ ID NO: 75 - RNA, 21 nt, synthetic construct
  misc_feature 1..21: note = source = /note="Description of Artificial Sequence: Synthetic oligonucleotide"
  source 1..21: mol_type = other RNA
ctgcttcatccccttctactt

SEQ ID NO: 76 - RNA, 21 nt, synthetic construct
  misc_feature 1..21: note = source = /note="Description of Artificial Sequence: Synthetic oligonucleotide"
  source 1..21: mol_type = other RNA
gtagaaggggatgaagcagtt

SEQ ID NO: 77 - RNA, 21 nt, synthetic construct
  misc_feature 1..21: note = source = /note="Description of Artificial Sequence: Synthetic oligonucleotide"
  source 1..21: mol_type = other RNA
tgcttcatccccttctacatt

SEQ ID NO: 78 - RNA, 21 nt, synthetic construct
  misc_feature 1..21: note = source = /note="Description of Artificial Sequence: Synthetic oligonucleotide"
  source 1..21: mol_type = other RNA
tgtagaaggggatgaagcatt

SEQ ID NO: 79 - RNA, 21 nt, synthetic construct
  misc_feature 1..21: note = source = /note="Description of Artificial Sequence: Synthetic oligonucleotide"
  source 1..21: mol_type = other RNA
ttcatccccttctacagtgtt

SEQ ID NO: 80 - RNA, 21 nt, synthetic construct
  misc_feature 1..21: note = source = /note="Description of Artificial Sequence: Synthetic oligonucleotide"
  source 1..21: mol_type = other RNA
cactgtagaaggggatgaatt

SEQ ID NO: 81 - RNA, 21 nt, synthetic construct
  misc_feature 1..21: note = source = /note="Description of Artificial Sequence: Synthetic oligonucleotide"
  source 1..21: mol_type = other RNA
tcatccccttctacagtggtt

SEQ ID NO: 82 - RNA, 21 nt, synthetic construct
  misc_feature 1..21: note = source = /note="Description of Artificial Sequence: Synthetic oligonucleotide"
  source 1..21: mol_type = other RNA
ccactgtagaaggggatgatt

SEQ ID NO: 83 - RNA, 21 nt, synthetic construct
  misc_feature 1..21: note = source = /note="Description of Artificial Sequence: Synthetic oligonucleotide"
  source 1..21: mol_type = other RNA
catccccttctacagtggctt

SEQ ID NO: 84 - RNA, 21 nt, synthetic construct
  misc_feature 1..21: note = source = /note="Description of Artificial Sequence: Synthetic oligonucleotide"
  source 1..21: mol_type = other RNA
gccactgtagaaggggatgtt

SEQ ID NO: 85 - RNA, 21 nt, synthetic construct
  misc_feature 1..21: note = source = /note="Description of Artificial Sequence: Synthetic oligonucleotide"
  source 1..21: mol_type = other RNA
tccccttctacagtggccttt

SEQ ID NO: 86 - RNA, 21 nt, synthetic construct
  misc_feature 1..21: note = source = /note="Description of Artificial Sequence: Synthetic oligonucleotide"
  source 1..21: mol_type = other RNA
aggccactgtagaaggggatt

SEQ ID NO: 87 - RNA, 21 nt, synthetic construct
  misc_feature 1..21: note = source = /note="Description of Artificial Sequence: Synthetic oligonucleotide"
  source 1..21: mol_type = other RNA
gatcaggacccgagccgattt

SEQ ID NO: 88 - RNA, 21 nt, synthetic construct
  misc_feature 1..21: note = source = /note="Description of Artificial Sequence: Synthetic oligonucleotide"
  source 1..21: mol_type = other RNA
atcggctcgggtcctgatctt

SEQ ID NO: 89 - RNA, 21 nt, synthetic construct
  misc_feature 1..21: note = source = /note="Description of Artificial Sequence: Synthetic oligonucleotide"
  source 1..21: mol_type = other RNA
tgggcttctaccacgtcgttt

SEQ ID NO: 90 - RNA, 21 nt, synthetic construct
  misc_feature 1..21: note = source = /note="Description of Artificial Sequence: Synthetic oligonucleotide"
  source 1..21: mol_type = other RNA
acgacgtggtagaagcccatt

SEQ ID NO: 91 - RNA, 21 nt, synthetic construct
  misc_feature 1..21: note = source = /note="Description of Artificial Sequence: Synthetic oligonucleotide"
  source 1..21: mol_type = other RNA
gagcgagcacgccccgcattt

SEQ ID NO: 92 - RNA, 21 nt, synthetic construct
  misc_feature 1..21: note = source = /note="Description of Artificial Sequence: Synthetic oligonucleotide"
  source 1..21: mol_type = other RNA
atgcggggcgtgctcgctctt

SEQ ID NO: 93 - RNA, 21 nt, synthetic construct
  misc_feature 1..21: note = source = /note="Description of Artificial Sequence: Synthetic oligonucleotide"
  source 1..21: mol_type = other RNA
tgcactgcgtcggcgtccttt

SEQ ID NO: 94 - RNA, 21 nt, synthetic construct
  misc_feature 1..21: note = source = /note="Description of Artificial Sequence: Synthetic oligonucleotide"
  source 1..21: mol_type = other RNA
aggacgccgacgcagtgcatt

SEQ ID NO: 95 - RNA, 21 nt, synthetic construct
  misc_feature 1..21: note = source = /note="Description of Artificial Sequence: Synthetic oligonucleotide"
  source 1..21: mol_type = other RNA
tggagcagactctgcaggttt

SEQ ID NO: 96 - RNA, 21 nt, synthetic construct
  misc_feature 1..21: note = source = /note="Description of Artificial Sequence: Synthetic oligonucleotide"
  source 1..21: mol_type = other RNA
acctgcagagtctgctccatt

SEQ ID NO: 97 - RNA, 21 nt, synthetic construct
  misc_feature 1..21: note = source = /note="Description of Artificial Sequence: Synthetic oligonucleotide"
  source 1..21: mol_type = other RNA
tgcaggtcctctcagatcttt

SEQ ID NO: 98 - RNA, 21 nt, synthetic construct
  misc_feature 1..21: note = source = /note="Description of Artificial Sequence: Synthetic oligonucleotide"
  source 1..21: mol_type = other RNA
agatctgagaggacctgcatt

SEQ ID NO: 99 - RNA, 21 nt, synthetic construct
  misc_feature 1..21: note = source = /note="Description of Artificial Sequence: Synthetic oligonucleotide"
  source 1..21: mol_type = other RNA
cccggccaatgtccaccattt

SEQ ID NO: 100 - RNA, 21 nt, synthetic construct
  misc_feature 1..21: note = source = /note="Description of Artificial Sequence: Synthetic oligonucleotide"
  source 1..21: mol_type = other RNA
atggtggacattggccgggtt

SEQ ID NO: 101 - RNA, 21 nt, synthetic construct
  misc_feature 1..21: note = source = /note="Description of Artificial Sequence: Synthetic oligonucleotide"
  source 1..21: mol_type = other RNA
ttctacagtggccttatcttt

SEQ ID NO: 102 - RNA, 21 nt, synthetic construct
  misc_feature 1..21: note = source = /note="Description of Artificial Sequence: Synthetic oligonucleotide"
  source 1..21: mol_type = other RNA
agataaggccactgtagaatt

SEQ ID NO: 103 - RNA, 21 nt, synthetic construct
  misc_feature 1..21: note = source = /note="Description of Artificial Sequence: Synthetic oligonucleotide"
  source 1..21: mol_type = other RNA
tctacagtggccttatccttt

SEQ ID NO: 104 - RNA, 21 nt, synthetic construct
  misc_feature 1..21: note = source = /note="Description of Artificial Sequence: Synthetic oligonucleotide"
  source 1..21: mol_type = other RNA
aggataaggccactgtagatt

SEQ ID NO: 105 - RNA, 21 nt, synthetic construct
  misc_feature 1..21: note = source = /note="Description of Artificial Sequence: Synthetic oligonucleotide"
  source 1..21: mol_type = other RNA
cttccttcagaggcgtgcttt

SEQ ID NO: 106 - RNA, 21 nt, synthetic construct
  misc_feature 1..21: note = source = /note="Description of Artificial Sequence: Synthetic oligonucleotide"
  source 1..21: mol_type = other RNA
agcacgcctctgaaggaagtt

SEQ ID NO: 107 - RNA, 21 nt, synthetic construct
  misc_feature 1..21: note = source = /note="Description of Artificial Sequence: Synthetic oligonucleotide"
  source 1..21: mol_type = other RNA
ttccttcagaggcgtgcgatt

SEQ ID NO: 108 - RNA, 21 nt, synthetic construct
  misc_feature 1..21: note = source = /note="Description of Artificial Sequence: Synthetic oligonucleotide"
  source 1..21: mol_type = other RNA
tcgcacgcctctgaaggaatt

SEQ ID NO: 109 - RNA, 21 nt, synthetic construct
  misc_feature 1..21: note = source = /note="Description of Artificial Sequence: Synthetic oligonucleotide"
  source 1..21: mol_type = other RNA
gcgtgcgatatgtggatgttt

SEQ ID NO: 110 - RNA, 21 nt, synthetic construct
  misc_feature 1..21: note = source = /note="Description of Artificial Sequence: Synthetic oligonucleotide"
  source 1..21: mol_type = other RNA
acatccacatatcgcacgctt

SEQ ID NO: 111 - RNA, 21 nt, synthetic construct
  misc_feature 1..21: note = source = /note="Description of Artificial Sequence: Synthetic oligonucleotide"
  source 1..21: mol_type = other RNA
cgtgcgatatgtggatggatt

SEQ ID NO: 112 - RNA, 21 nt, synthetic construct
  misc_feature 1..21: note = source = /note="Description of Artificial Sequence: Synthetic oligonucleotide"
  source 1..21: mol_type = other RNA
tccatccacatatcgcacgtt

SEQ ID NO: 113 - RNA, 21 nt, synthetic construct
  misc_feature 1..21: note = source = /note="Description of Artificial Sequence: Synthetic oligonucleotide"
  source 1..21: mol_type = other RNA
tggatggaggagtgagtgatt

SEQ ID NO: 114 - RNA, 21 nt, synthetic construct
  misc_feature 1..21: note = source = /note="Description of Artificial Sequence: Synthetic oligonucleotide"
  source 1..21: mol_type = other RNA
tcactcactcctccatccatt

SEQ ID NO: 115 - RNA, 21 nt, synthetic construct
  misc_feature 1..21: note = source = /note="Description of Artificial Sequence: Synthetic oligonucleotide"
  source 1..21: mol_type = other RNA
acgtacccttcattgatgttt

SEQ ID NO: 116 - RNA, 21 nt, synthetic construct
  misc_feature 1..21: note = source = /note="Description of Artificial Sequence: Synthetic oligonucleotide"
  source 1..21: mol_type = other RNA
acatcaatgaagggtacgttt

SEQ ID NO: 117 - RNA, 21 nt, synthetic construct
  misc_feature 1..21: note = source = /note="Description of Artificial Sequence: Synthetic oligonucleotide"
  source 1..21: mol_type = other RNA
tggacatcaccaagctcattt

SEQ ID NO: 118 - RNA, 21 nt, synthetic construct
  misc_feature 1..21: note = source = /note="Description of Artificial Sequence: Synthetic oligonucleotide"
  source 1..21: mol_type = other RNA
atgagcttggtgatgtccatt

SEQ ID NO: 119 - RNA, 21 nt, synthetic construct
  misc_feature 1..21: note = source = /note="Description of Artificial Sequence: Synthetic oligonucleotide"
  source 1..21: mol_type = other RNA
cacctgcgtctcagcatcttt

SEQ ID NO: 120 - RNA, 21 nt, synthetic construct
  misc_feature 1..21: note = source = /note="Description of Artificial Sequence: Synthetic oligonucleotide"
  source 1..21: mol_type = other RNA
agatgctgagacgcaggtgtt

SEQ ID NO: 121 - RNA, 21 nt, synthetic construct
  misc_feature 1..21: note = source = /note="Description of Artificial Sequence: Synthetic oligonucleotide"
  source 1..21: mol_type = other RNA
acctgcgtctcagcatccttt

SEQ ID NO: 122 - RNA, 21 nt, synthetic construct
  misc_feature 1..21: note = source = /note="Description of Artificial Sequence: Synthetic oligonucleotide"
  source 1..21: mol_type = other RNA
aggatgctgagacgcaggttt

SEQ ID NO: 123 - RNA, 21 nt, synthetic construct
  misc_feature 1..21: note = source = /note="Description of Artificial Sequence: Synthetic oligonucleotide"
  source 1..21: mol_type = other RNA
ccagagactggtgacatgttt

SEQ ID NO: 124 - RNA, 21 nt, synthetic construct
  misc_feature 1..21: note = source = /note="Description of Artificial Sequence: Synthetic oligonucleotide"
  source 1..21: mol_type = other RNA
acatgtcaccagtctctggtt

SEQ ID NO: 125 - RNA, 21 nt, synthetic construct
  misc_feature 1..21: note = source = /note="Description of Artificial Sequence: Synthetic oligonucleotide"
  source 1..21: mol_type = other RNA
atggcttccagatatgccttt

SEQ ID NO: 126 - RNA, 21 nt, synthetic construct
  misc_feature 1..21: note = source = /note="Description of Artificial Sequence: Synthetic oligonucleotide"
  source 1..21: mol_type = other RNA
aggcatatctggaagccattt

SEQ ID NO: 127 - RNA, 21 nt, synthetic construct
  misc_feature 1..21: note = source = /note="Description of Artificial Sequence: Synthetic oligonucleotide"
  source 1..21: mol_type = other RNA
ccgcctccaggtcccaaattt

SEQ ID NO: 128 - RNA, 21 nt, synthetic construct
  misc_feature 1..21: note = source = /note="Description of Artificial Sequence: Synthetic oligonucleotide"
  source 1..21: mol_type = other RNA
atttgggacctggaggcggtt

SEQ ID NO: 129 - RNA, 21 nt, synthetic construct
  misc_feature 1..21: note = source = /note="Description of Artificial Sequence: Synthetic oligonucleotide"
  source 1..21: mol_type = other RNA
tacctgctggtgctgaggttt

SEQ ID NO: 130 - RNA, 21 nt, synthetic construct
  misc_feature 1..21: note = source = /note="Description of Artificial Sequence: Synthetic oligonucleotide"
  source 1..21: mol_type = other RNA
acctcagcaccagcaggtatt

SEQ ID NO: 131 - RNA, 21 nt, synthetic construct
  misc_feature 1..21: note = source = /note="Description of Artificial Sequence: Synthetic oligonucleotide"
  source 1..21: mol_type = other RNA
acctgctggtgctgagggttt

SEQ ID NO: 132 - RNA, 21 nt, synthetic construct
  misc_feature 1..21: note = source = /note="Description of Artificial Sequence: Synthetic oligonucleotide"
  source 1..21: mol_type = other RNA
accctcagcaccagcaggttt

SEQ ID NO: 133 - RNA, 21 nt, synthetic construct
  misc_feature 1..21: note = source = /note="Description of Artificial Sequence: Synthetic oligonucleotide"
  source 1..21: mol_type = other RNA
ctctccacctttcccagtttt

SEQ ID NO: 134 - RNA, 21 nt, synthetic construct
  misc_feature 1..21: note = source = /note="Description of Artificial Sequence: Synthetic oligonucleotide"
  source 1..21: mol_type = other RNA
aactgggaaaggtggagagtt

SEQ ID NO: 135 - RNA, 21 nt, synthetic construct
  misc_feature 1..21: note = source = /note="Description of Artificial Sequence: Synthetic oligonucleotide"
  source 1..21: mol_type = other RNA
tttttcacctaactaaaattt

SEQ ID NO: 136 - RNA, 21 nt, synthetic construct
  misc_feature 1..21: note = source = /note="Description of Artificial Sequence: Synthetic oligonucleotide"
  source 1..21: mol_type = other RNA
attttagttaggtgaaaaatt

SEQ ID NO: 137 - RNA, 21 nt, synthetic construct
  misc_feature 1..21: note = source = /note="Description of Artificial Sequence: Synthetic oligonucleotide"
  source 1..21: mol_type = other RNA
cggccaatgtccaccagcttt

SEQ ID NO: 138 - RNA, 21 nt, synthetic construct
  misc_feature 1..21: note = source = /note="Description of Artificial Sequence: Synthetic oligonucleotide"
  source 1..21: mol_type = other RNA
agctggtggacattggccgtt

SEQ ID NO: 139 - RNA, 21 nt, synthetic construct
  misc_feature 1..21: note = source = /note="Description of Artificial Sequence: Synthetic oligonucleotide"
  source 1..21: mol_type = other RNA
ggtccagcctgaacttctttt

SEQ ID NO: 140 - RNA, 21 nt, synthetic construct
  misc_feature 1..21: note = source = /note="Description of Artificial Sequence: Synthetic oligonucleotide"
  source 1..21: mol_type = other RNA
aagaagttcaggctggacctt

SEQ ID NO: 141 - RNA, 21 nt, synthetic construct
  misc_feature 1..21: note = source = /note="Description of Artificial Sequence: Synthetic oligonucleotide"
  source 1..21: mol_type = other RNA
gcggcttcctgggcttctatt

SEQ ID NO: 142 - RNA, 21 nt, synthetic construct
  misc_feature 1..21: note = source = /note="Description of Artificial Sequence: Synthetic oligonucleotide"
  source 1..21: mol_type = other RNA
tagaagcccaggaagccgctt

SEQ ID NO: 143 - RNA, 21 nt, synthetic construct
  misc_feature 1..21: note = source = /note="Description of Artificial Sequence: Synthetic oligonucleotide"
  source 1..21: mol_type = other RNA
gtgacaacgtacccttcattt

SEQ ID NO: 144 - RNA, 21 nt, synthetic construct
  misc_feature 1..21: note = source = /note="Description of Artificial Sequence: Synthetic oligonucleotide"
  source 1..21: mol_type = other RNA
atgaagggtacgttgtcactt

SEQ ID NO: 145 - RNA, 21 nt, synthetic construct
  misc_feature 1..21: note = source = /note="Description of Artificial Sequence: Synthetic oligonucleotide"
  source 1..21: mol_type = other RNA
ggtatgttcctgcttcatgtt

SEQ ID NO: 146 - RNA, 21 nt, synthetic construct
  misc_feature 1..21: note = source = /note="Description of Artificial Sequence: Synthetic oligonucleotide"
  source 1..21: mol_type = other RNA
catgaagcaggaacatacctt

SEQ ID NO: 147 - RNA, 21 nt, synthetic construct
  misc_feature 1..21: note = source = /note="Description of Artificial Sequence: Synthetic oligonucleotide"
  source 1..21: mol_type = other RNA
gtatgttcctgcttcatgctt

SEQ ID NO: 148 - RNA, 21 nt, synthetic construct
  misc_feature 1..21: note = source = /note="Description of Artificial Sequence: Synthetic oligonucleotide"
  source 1..21: mol_type = other RNA
gcatgaagcaggaacatactt

SEQ ID NO: 149 - RNA, 21 nt, synthetic construct
  misc_feature 1..21: note = source = /note="Description of Artificial Sequence: Synthetic oligonucleotide"
  source 1..21: mol_type = other RNA
tgttcctgcttcatgcccttt

SEQ ID NO: 150 - RNA, 21 nt, synthetic construct
  misc_feature 1..21: note = source = /note="Description of Artificial Sequence: Synthetic oligonucleotide"
  source 1..21: mol_type = other RNA
agggcatgaagcaggaacatt

SEQ ID NO: 151 - RNA, 21 nt, synthetic construct
  misc_feature 1..21: note = source = /note="Description of Artificial Sequence: Synthetic oligonucleotide"
  source 1..21: mol_type = other RNA
gttcctgcttcatgccctttt

SEQ ID NO: 152 - RNA, 21 nt, synthetic construct
  misc_feature 1..21: note = source = /note="Description of Artificial Sequence: Synthetic oligonucleotide"
  source 1..21: mol_type = other RNA
aagggcatgaagcaggaactt

SEQ ID NO: 153 - RNA, 21 nt, synthetic construct
  misc_feature 1..21: note = source = /note="Description of Artificial Sequence: Synthetic oligonucleotide"
  source 1..21: mol_type = other RNA
cctgcttcatgcccttctatt

SEQ ID NO: 154 - RNA, 21 nt, synthetic construct
  misc_feature 1..21: note = source = /note="Description of Artificial Sequence: Synthetic oligonucleotide"
  source 1..21: mol_type = other RNA
tagaagggcatgaagcaggtt

SEQ ID NO: 155 - RNA, 21 nt, synthetic construct
  misc_feature 1..21: note = source = /note="Description of Artificial Sequence: Synthetic oligonucleotide"
  source 1..21: mol_type = other RNA
gcttcatgcccttctacagtt

SEQ ID NO: 156 - RNA, 21 nt, synthetic construct
  misc_feature 1..21: note = source = /note="Description of Artificial Sequence: Synthetic oligonucleotide"
  source 1..21: mol_type = other RNA
ctgtagaagggcatgaagctt

SEQ ID NO: 157 - RNA, 21 nt, synthetic construct
  misc_feature 1..21: note = source = /note="Description of Artificial Sequence: Synthetic oligonucleotide"
  source 1..21: mol_type = other RNA
cttcatgcccttctacagttt

SEQ ID NO: 158 - RNA, 21 nt, synthetic construct
  misc_feature 1..21: note = source = /note="Description of Artificial Sequence: Synthetic oligonucleotide"
  source 1..21: mol_type = other RNA
actgtagaagggcatgaagtt

SEQ ID NO: 159 - RNA, 21 nt, synthetic construct
  misc_feature 1..21: note = source = /note="Description of Artificial Sequence: Synthetic oligonucleotide"
  source 1..21: mol_type = other RNA
ttcatgcccttctacagtgtt

SEQ ID NO: 160 - RNA, 21 nt, synthetic construct
  misc_feature 1..21: note = source = /note="Description of Artificial Sequence: Synthetic oligonucleotide"
  source 1..21: mol_type = other RNA
cactgtagaagggcatgaatt

SEQ ID NO: 161 - RNA, 21 nt, synthetic construct
  misc_feature 1..21: note = source = /note="Description of Artificial Sequence: Synthetic oligonucleotide"
  source 1..21: mol_type = other RNA
atggcttccagatatgccttt

SEQ ID NO: 162 - RNA, 21 nt, synthetic construct
  misc_feature 1..21: note = source = /note="Description of Artificial Sequence: Synthetic oligonucleotide"
  source 1..21: mol_type = other RNA
aggcatatctggaagccattt

SEQ ID NO: 163 - RNA, 21 nt, synthetic construct
  misc_feature 1..21: note = source = /note="Description of Artificial Sequence: Synthetic oligonucleotide"
  source 1..21: mol_type = other RNA
atgcccttctacagtggcctt

SEQ ID NO: 164 - RNA, 21 nt, synthetic construct
  misc_feature 1..21: note = source = /note="Description of Artificial Sequence: Synthetic oligonucleotide"
  source 1..21: mol_type = other RNA
ggccactgtagaagggcattt

SEQ ID NO: 165 - RNA, 21 nt, synthetic construct
  misc_feature 1..21: note = source = /note="Description of Artificial Sequence: Synthetic oligonucleotide"
  source 1..21: mol_type = other RNA
gcttcatgcccttctacattt

SEQ ID NO: 166 - RNA, 21 nt, synthetic construct
  misc_feature 1..21: note = source = /note="Description of Artificial Sequence: Synthetic oligonucleotide"
  source 1..21: mol_type = other RNA
atgtagaagggcatgaagctt

SEQ ID NO: 167 - RNA, 21 nt, synthetic construct
  misc_feature 1..21: note = source = /note="Description of Artificial Sequence: Synthetic oligonucleotide"
  source 1..21: mol_type = other RNA
gggcaataaagtacctgcttt

SEQ ID NO: 168 - RNA, 21 nt, synthetic construct
  misc_feature 1..21: note = source = /note="Description of Artificial Sequence: Synthetic oligonucleotide"
  source 1..21: mol_type = other RNA
agcaggtactttattgccctt

SEQ ID NO: 169 - RNA, 21 nt, synthetic construct
  misc_feature 1..21: note = source = /note="Description of Artificial Sequence: Synthetic oligonucleotide"
  source 1..21: mol_type = other RNA
cggccaatgtccaccagcttt

SEQ ID NO: 170 - RNA, 21 nt, synthetic construct
  misc_feature 1..21: note = source = /note="Description of Artificial Sequence: Synthetic oligonucleotide"
  source 1..21: mol_type = other RNA
agctggtggacattggccgtt

SEQ ID NO: 171 - RNA, 21 nt, synthetic construct
  misc_feature 1..21: note = source = /note="Description of Artificial Sequence: Synthetic oligonucleotide"
  source 1..21: mol_type = other RNA
ggtccagcctgaacttctttt

SEQ ID NO: 172 - RNA, 21 nt, synthetic construct
  misc_feature 1..21: note = source = /note="Description of Artificial Sequence: Synthetic oligonucleotide"
  source 1..21: mol_type = other RNA
aagaagttcaggctggacctt

SEQ ID NO: 173 - RNA, 21 nt, synthetic construct
  misc_feature 1..21: note = source = /note="Description of Artificial Sequence: Synthetic oligonucleotide"
  source 1..21: mol_type = other RNA
gcttcatccccttctacagtt

SEQ ID NO: 174 - RNA, 21 nt, synthetic construct
  misc_feature 1..21: note = source = /note="Description of Artificial Sequence: Synthetic oligonucleotide"
  source 1..21: mol_type = other RNA
ctgtagaaggggatgaagctt

SEQ ID NO: 175 - RNA, 21 nt, synthetic construct
  misc_feature 1..21: note = source = /note="Description of Artificial Sequence: Synthetic oligonucleotide"
  source 1..21: mol_type = other RNA
gcggcttcctgggcttctatt

SEQ ID NO: 176 - RNA, 21 nt, synthetic construct
  misc_feature 1..21: note = source = /note="Description of Artificial Sequence: Synthetic oligonucleotide"
  source 1..21: mol_type = other RNA
tagaagcccaggaagccgctt

SEQ ID NO: 177 - RNA, 21 nt, synthetic construct
  misc_feature 1..21: note = source = /note="Description of Artificial Sequence: Synthetic oligonucleotide"
  source 1..21: mol_type = other RNA
gcctctgagctgagttggttt

SEQ ID NO: 178 - RNA, 21 nt, synthetic construct
  misc_feature 1..21: note = source = /note="Description of Artificial Sequence: Synthetic oligonucleotide"
  source 1..21: mol_type = other RNA
accaactcagctcagaggctt

SEQ ID NO: 179 - RNA, 21 nt, synthetic construct
  misc_feature 1..21: note = source = /note="Description of Artificial Sequence: Synthetic oligonucleotide"
  source 1..21: mol_type = other RNA
gtgacaacgtacccttcattt

SEQ ID NO: 180 - RNA, 21 nt, synthetic construct
  misc_feature 1..21: note = source = /note="Description of Artificial Sequence: Synthetic oligonucleotide"
  source 1..21: mol_type = other RNA
atgaagggtacgttgtcactt

SEQ ID NO: 181 - RNA, 21 nt, synthetic construct
  misc_feature 1..21: note = source = /note="Description of Artificial Sequence: Synthetic oligonucleotide"
  source 1..21: mol_type = other RNA
cccgcctccaggtcccaaatt

SEQ ID NO: 182 - RNA, 21 nt, synthetic construct
  misc_feature 1..21: note = source = /note="Description of Artificial Sequence: Synthetic oligonucleotide"
  source 1..21: mol_type = other RNA
tttgggacctggaggcgggtt

SEQ ID NO: 183 - RNA, 21 nt, synthetic construct
  misc_feature 1..21: note = source = /note="Description of Artificial Sequence: Synthetic oligonucleotide"
  source 1..21: mol_type = other RNA
cttcatccccttctacagttt

SEQ ID NO: 184 - RNA, 21 nt, synthetic construct
  misc_feature 1..21: note = source = /note="Description of Artificial Sequence: Synthetic oligonucleotide"
  source 1..21: mol_type = other RNA
actgtagaaggggatgaagtt

SEQ ID NO: 185 - RNA, 21 nt, synthetic construct
  misc_feature 1..21: note = source = /note="Description of Artificial Sequence: Synthetic oligonucleotide"
  source 1..21: mol_type = other RNA
ggtatgttcctgcttcatgtt

SEQ ID NO: 186 - RNA, 21 nt, synthetic construct
  misc_feature 1..21: note = source = /note="Description of Artificial Sequence: Synthetic oligonucleotide"
  source 1..21: mol_type = other RNA
catgaagcaggaacatacctt

SEQ ID NO: 187 - RNA, 21 nt, synthetic construct
  misc_feature 1..21: note = source = /note="Description of Artificial Sequence: Synthetic oligonucleotide"
  source 1..21: mol_type = other RNA
gtatgttcctgcttcatgctt

SEQ ID NO: 188 - RNA, 21 nt, synthetic construct
  misc_feature 1..21: note = source = /note="Description of Artificial Sequence: Synthetic oligonucleotide"
  source 1..21: mol_type = other RNA
gcatgaagcaggaacatactt

SEQ ID NO: 189 - RNA, 21 nt, synthetic construct
  misc_feature 1..21: note = source = /note="Description of Artificial Sequence: Synthetic oligonucleotide"
  source 1..21: mol_type = other RNA
tatgttcctgcttcatgcctt

SEQ ID NO: 190 - RNA, 21 nt, synthetic construct
  misc_feature 1..21: note = source = /note="Description of Artificial Sequence: Synthetic oligonucleotide"
  source 1..21: mol_type = other RNA
ggcatgaagcaggaacatatt

SEQ ID NO: 191 - RNA, 21 nt, synthetic construct
  misc_feature 1..21: note = source = /note="Description of Artificial Sequence: Synthetic oligonucleotide"
  source 1..21: mol_type = other RNA
atgttcctgcttcatgccctt

SEQ ID NO: 192 - RNA, 21 nt, synthetic construct
  misc_feature 1..21: note = source = /note="Description of Artificial Sequence: Synthetic oligonucleotide"
  source 1..21: mol_type = other RNA
gggcatgaagcaggaacattt

SEQ ID NO: 193 - RNA, 21 nt, synthetic construct
  misc_feature 1..21: note = source = /note="Description of Artificial Sequence: Synthetic oligonucleotide"
  source 1..21: mol_type = other RNA
tgttcctgcttcatgcccttt

SEQ ID NO: 194 - RNA, 21 nt, synthetic construct
  misc_feature 1..21: note = source = /note="Description of Artificial Sequence: Synthetic oligonucleotide"
  source 1..21: mol_type = other RNA
agggcatgaagcaggaacatt

SEQ ID NO: 195 - RNA, 21 nt, synthetic construct
  misc_feature 1..21: note = source = /note="Description of Artificial Sequence: Synthetic oligonucleotide"
  source 1..21: mol_type = other RNA
gttcctgcttcatgccctttt

SEQ ID NO: 196 - RNA, 21 nt, synthetic construct
  misc_feature 1..21: note = source = /note="Description of Artificial Sequence: Synthetic oligonucleotide"
  source 1..21: mol_type = other RNA
aagggcatgaagcaggaactt

SEQ ID NO: 197 - RNA, 21 nt, synthetic construct
  misc_feature 1..21: note = source = /note="Description of Artificial Sequence: Synthetic oligonucleotide"
  source 1..21: mol_type = other RNA
ttcctgcttcatgcccttctt

SEQ ID NO: 198 - RNA, 21 nt, synthetic construct
  misc_feature 1..21: note = source = /note="Description of Artificial Sequence: Synthetic oligonucleotide"
  source 1..21: mol_type = other RNA
gaagggcatgaagcaggaatt

SEQ ID NO: 199 - RNA, 21 nt, synthetic construct
  misc_feature 1..21: note = source = /note="Description of Artificial Sequence: Synthetic oligonucleotide"
  source 1..21: mol_type = other RNA
tcctgcttcatgcccttcttt

SEQ ID NO: 200 - RNA, 21 nt, synthetic construct
  misc_feature 1..21: note = source = /note="Description of Artificial Sequence: Synthetic oligonucleotide"
  source 1..21: mol_type = other RNA
agaagggcatgaagcaggatt

SEQ ID NO: 201 - RNA, 21 nt, synthetic construct
  misc_feature 1..21: note = source = /note="Description of Artificial Sequence: Synthetic oligonucleotide"
  source 1..21: mol_type = other RNA
cctgcttcatgcccttctatt

SEQ ID NO: 202 - RNA, 21 nt, synthetic construct
  misc_feature 1..21: note = source = /note="Description of Artificial Sequence: Synthetic oligonucleotide"
  source 1..21: mol_type = other RNA
tagaagggcatgaagcaggtt

SEQ ID NO: 203 - RNA, 21 nt, synthetic construct
  misc_feature 1..21: note = source = /note="Description of Artificial Sequence: Synthetic oligonucleotide"
  source 1..21: mol_type = other RNA
ctgcttcatgcccttctactt

SEQ ID NO: 204 - RNA, 21 nt, synthetic construct
  misc_feature 1..21: note = source = /note="Description of Artificial Sequence: Synthetic oligonucleotide"
  source 1..21: mol_type = other RNA
gtagaagggcatgaagcagtt

SEQ ID NO: 205 - RNA, 21 nt, synthetic construct
  misc_feature 1..21: note = source = /note="Description of Artificial Sequence: Synthetic oligonucleotide"
  source 1..21: mol_type = other RNA
tgcttcatgcccttctacatt

SEQ ID NO: 206 - RNA, 21 nt, synthetic construct
  misc_feature 1..21: note = source = /note="Description of Artificial Sequence: Synthetic oligonucleotide"
  source 1..21: mol_type = other RNA
tgtagaagggcatgaagcatt

SEQ ID NO: 207 - RNA, 21 nt, synthetic construct
  misc_feature 1..21: note = source = /note="Description of Artificial Sequence: Synthetic oligonucleotide"
  source 1..21: mol_type = other RNA
gcttcatgcccttctacagtt

SEQ ID NO: 208 - RNA, 21 nt, synthetic construct
  misc_feature 1..21: note = source = /note="Description of Artificial Sequence: Synthetic oligonucleotide"
  source 1..21: mol_type = other RNA
ctgtagaagggcatgaagctt

SEQ ID NO: 209 - RNA, 21 nt, synthetic construct
  misc_feature 1..21: note = source = /note="Description of Artificial Sequence: Synthetic oligonucleotide"
  source 1..21: mol_type = other RNA
cttcatgcccttctacagttt

SEQ ID NO: 210 - RNA, 21 nt, synthetic construct
  misc_feature 1..21: note = source = /note="Description of Artificial Sequence: Synthetic oligonucleotide"
  source 1..21: mol_type = other RNA
actgtagaagggcatgaagtt

SEQ ID NO: 211 - RNA, 21 nt, synthetic construct
  misc_feature 1..21: note = source = /note="Description of Artificial Sequence: Synthetic oligonucleotide"
  source 1..21: mol_type = other RNA
ttcatgcccttctacagtgtt

SEQ ID NO: 212 - RNA, 21 nt, synthetic construct
  misc_feature 1..21: note = source = /note="Description of Artificial Sequence: Synthetic oligonucleotide"
  source 1..21: mol_type = other RNA
cactgtagaagggcatgaatt

SEQ ID NO: 213 - RNA, 21 nt, synthetic construct
  misc_feature 1..21: note = source = /note="Description of Artificial Sequence: Synthetic oligonucleotide"
  source 1..21: mol_type = other RNA
tcatgcccttctacagtggtt

SEQ ID NO: 214 - RNA, 21 nt, synthetic construct
  misc_feature 1..21: note = source = /note="Description of Artificial Sequence: Synthetic oligonucleotide"
  source 1..21: mol_type = other RNA
ccactgtagaagggcatgatt

SEQ ID NO: 215 - RNA, 21 nt, synthetic construct
  misc_feature 1..21: note = source = /note="Description of Artificial Sequence: Synthetic oligonucleotide"
  source 1..21: mol_type = other RNA
catgcccttctacagtggctt

SEQ ID NO: 216 - RNA, 21 nt, synthetic construct
  misc_feature 1..21: note = source = /note="Description of Artificial Sequence: Synthetic oligonucleotide"
  source 1..21: mol_type = other RNA
gccactgtagaagggcatgtt

SEQ ID NO: 217 - RNA, 21 nt, synthetic construct
  misc_feature 1..21: note = source = /note="Description of Artificial Sequence: Synthetic oligonucleotide"
  source 1..21: mol_type = other RNA
atgcccttctacagtggcctt

SEQ ID NO: 218 - RNA, 21 nt, synthetic construct
  misc_feature 1..21: note = source = /note="Description of Artificial Sequence: Synthetic oligonucleotide"
  source 1..21: mol_type = other RNA
ggccactgtagaagggcattt

SEQ ID NO: 219 - RNA, 21 nt, synthetic construct
  misc_feature 1..21: note = source = /note="Description of Artificial Sequence: Synthetic oligonucleotide"
  source 1..21: mol_type = other RNA
tgcccttctacagtggccttt

SEQ ID NO: 220 - RNA, 21 nt, synthetic construct
  misc_feature 1..21: note = source = /note="Description of Artificial Sequence: Synthetic oligonucleotide"
  source 1..21: mol_type = other RNA
aggccactgtagaagggcatt

SEQ ID NO: 221 - RNA, 21 nt, synthetic construct
  misc_feature 1..21: note = source = /note="Description of Artificial Sequence: Synthetic oligonucleotide"
  source 1..21: mol_type = other RNA
gcccttctacagtggcctttt

SEQ ID NO: 222 - RNA, 21 nt, synthetic construct
  misc_feature 1..21: note = source = /note="Description of Artificial Sequence: Synthetic oligonucleotide"
  source 1..21: mol_type = other RNA
aaggccactgtagaagggctt

SEQ ID NO: 223 - RNA, 21 nt, synthetic construct
  misc_feature 1..21: note = source = /note="Description of Artificial Sequence: Synthetic oligonucleotide"
  source 1..21: mol_type = other RNA
ggtatgttcctgcttcatctt

SEQ ID NO: 224 - RNA, 21 nt, synthetic construct
  misc_feature 1..21: note = source = /note="Description of Artificial Sequence: Synthetic oligonucleotide"
  source 1..21: mol_type = other RNA
gatgaagcaggaacatacctt

SEQ ID NO: 225 - RNA, 21 nt, synthetic construct
  misc_feature 1..21: note = source = /note="Description of Artificial Sequence: Synthetic oligonucleotide"
  source 1..21: mol_type = other RNA
gtatgttcctgcttcatcctt

SEQ ID NO: 226 - RNA, 21 nt, synthetic construct
  misc_feature 1..21: note = source = /note="Description of Artificial Sequence: Synthetic oligonucleotide"
  source 1..21: mol_type = other RNA
ggatgaagcaggaacatactt

SEQ ID NO: 227 - RNA, 21 nt, synthetic construct
  misc_feature 1..21: note = source = /note="Description of Artificial Sequence: Synthetic oligonucleotide"
  source 1..21: mol_type = other RNA
tatgttcctgcttcatccctt

SEQ ID NO: 228 - RNA, 21 nt, synthetic construct
  misc_feature 1..21: note = source = /note="Description of Artificial Sequence: Synthetic oligonucleotide"
  source 1..21: mol_type = other RNA
gggatgaagcaggaacatatt

SEQ ID NO: 229 - RNA, 21 nt, synthetic construct
  misc_feature 1..21: note = source = /note="Description of Artificial Sequence: Synthetic oligonucleotide"
  source 1..21: mol_type = other RNA
atgttcctgcttcatcccctt

SEQ ID NO: 230 - RNA, 21 nt, synthetic construct
  misc_feature 1..21: note = source = /note="Description of Artificial Sequence: Synthetic oligonucleotide"
  source 1..21: mol_type = other RNA
ggggatgaagcaggaacattt

SEQ ID NO: 231 - RNA, 21 nt, synthetic construct
  misc_feature 1..21: note = source = /note="Description of Artificial Sequence: Synthetic oligonucleotide"
  source 1..21: mol_type = other RNA
tgttcctgcttcatccccttt

SEQ ID NO: 232 - RNA, 21 nt, synthetic construct
  misc_feature 1..21: note = source = /note="Description of Artificial Sequence: Synthetic oligonucleotide"
  source 1..21: mol_type = other RNA
aggggatgaagcaggaacatt

SEQ ID NO: 233 - RNA, 21 nt, synthetic construct
  misc_feature 1..21: note = source = /note="Description of Artificial Sequence: Synthetic oligonucleotide"
  source 1..21: mol_type = other RNA
gttcctgcttcatcccctttt

SEQ ID NO: 234 - RNA, 21 nt, synthetic construct
  misc_feature 1..21: note = source = /note="Description of Artificial Sequence: Synthetic oligonucleotide"
  source 1..21: mol_type = other RNA
aaggggatgaagcaggaactt

SEQ ID NO: 235 - RNA, 21 nt, synthetic construct
  misc_feature 1..21: note = source = /note="Description of Artificial Sequence: Synthetic oligonucleotide"
  source 1..21: mol_type = other RNA
ttcctgcttcatccccttctt

SEQ ID NO: 236 - RNA, 21 nt, synthetic construct
  misc_feature 1..21: note = source = /note="Description of Artificial Sequence: Synthetic oligonucleotide"
  source 1..21: mol_type = other RNA
gaaggggatgaagcaggaatt

SEQ ID NO: 237 - RNA, 21 nt, synthetic construct
  misc_feature 1..21: note = source = /note="Description of Artificial Sequence: Synthetic oligonucleotide"
  source 1..21: mol_type = other RNA
tcctgcttcatccccttcttt

SEQ ID NO: 238 - RNA, 21 nt, synthetic construct
  misc_feature 1..21: note = source = /note="Description of Artificial Sequence: Synthetic oligonucleotide"
  source 1..21: mol_type = other RNA
agaaggggatgaagcaggatt

SEQ ID NO: 239 - RNA, 21 nt, synthetic construct
  misc_feature 1..21: note = source = /note="Description of Artificial Sequence: Synthetic oligonucleotide"
  source 1..21: mol_type = other RNA
cctgcttcatccccttctatt

SEQ ID NO: 240 - RNA, 21 nt, synthetic construct
  misc_feature 1..21: note = source = /note="Description of Artificial Sequence: Synthetic oligonucleotide"
  source 1..21: mol_type = other RNA
tagaaggggatgaagcaggtt

SEQ ID NO: 241 - RNA, 21 nt, synthetic construct
  misc_feature 1..21: note = source = /note="Description of Artificial Sequence: Synthetic oligonucleotide"
  source 1..21: mol_type = other RNA
ctgcttcatccccttctactt

SEQ ID NO: 242 - RNA, 21 nt, synthetic construct
  misc_feature 1..21: note = source = /note="Description of Artificial Sequence: Synthetic oligonucleotide"
  source 1..21: mol_type = other RNA
gtagaaggggatgaagcagtt

SEQ ID NO: 243 - RNA, 21 nt, synthetic construct
  misc_feature 1..21: note = source = /note="Description of Artificial Sequence: Synthetic oligonucleotide"
  source 1..21: mol_type = other RNA
tgcttcatccccttctacatt

SEQ ID NO: 244 - RNA, 21 nt, synthetic construct
  misc_feature 1..21: note = source = /note="Description of Artificial Sequence: Synthetic oligonucleotide"
  source 1..21: mol_type = other RNA
tgtagaaggggatgaagcatt

SEQ ID NO: 245 - RNA, 21 nt, synthetic construct
  misc_feature 1..21: note = source = /note="Description of Artificial Sequence: Synthetic oligonucleotide"
  source 1..21: mol_type = other RNA
ttcatccccttctacagtgtt

SEQ ID NO: 246 - RNA, 21 nt, synthetic construct
  misc_feature 1..21: note = source = /note="Description of Artificial Sequence: Synthetic oligonucleotide"
  source 1..21: mol_type = other RNA
cactgtagaaggggatgaatt

SEQ ID NO: 247 - RNA, 21 nt, synthetic construct
  misc_feature 1..21: note = source = /note="Description of Artificial Sequence: Synthetic oligonucleotide"
  source 1..21: mol_type = other RNA
tcatccccttctacagtggtt

SEQ ID NO: 248 - RNA, 21 nt, synthetic construct
  misc_feature 1..21: note = source = /note="Description of Artificial Sequence: Synthetic oligonucleotide"
  source 1..21: mol_type = other RNA
ccactgtagaaggggatgatt

SEQ ID NO: 249 - RNA, 21 nt, synthetic construct
  misc_feature 1..21: note = source = /note="Description of Artificial Sequence: Synthetic oligonucleotide"
  source 1..21: mol_type = other RNA
catccccttctacagtggctt

SEQ ID NO: 250 - RNA, 21 nt, synthetic construct
  misc_feature 1..21: note = source = /note="Description of Artificial Sequence: Synthetic oligonucleotide"
  source 1..21: mol_type = other RNA
gccactgtagaaggggatgtt

SEQ ID NO: 251 - RNA, 21 nt, synthetic construct
  misc_feature 1..21: note = source = /note="Description of Artificial Sequence: Synthetic oligonucleotide"
  source 1..21: mol_type = other RNA
tccccttctacagtggccttt

SEQ ID NO: 252 - RNA, 21 nt, synthetic construct
  misc_feature 1..21: note = source = /note="Description of Artificial Sequence: Synthetic oligonucleotide"
  source 1..21: mol_type = other RNA
aggccactgtagaaggggatt

SEQ ID NO: 253 - RNA, 21 nt, synthetic construct
  misc_feature 1..21: note = source = /note="Description of Artificial Sequence: Synthetic oligonucleotide"
  source 1..21: mol_type = other RNA
gatcaggacccgagccgattt

SEQ ID NO: 254 - RNA, 21 nt, synthetic construct
  misc_feature 1..21: note = source = /note="Description of Artificial Sequence: Synthetic oligonucleotide"
  source 1..21: mol_type = other RNA
atcggctcgggtcctgatctt

SEQ ID NO: 255 - RNA, 21 nt, synthetic construct
  misc_feature 1..21: note = source = /note="Description of Artificial Sequence: Synthetic oligonucleotide"
  source 1..21: mol_type = other RNA
tgggcttctaccacgtcgttt

SEQ ID NO: 256 - RNA, 21 nt, synthetic construct
  misc_feature 1..21: note = source = /note="Description of Artificial Sequence: Synthetic oligonucleotide"
  source 1..21: mol_type = other RNA
acgacgtggtagaagcccatt

SEQ ID NO: 257 - RNA, 21 nt, synthetic construct
  misc_feature 1..21: note = source = /note="Description of Artificial Sequence: Synthetic oligonucleotide"
  source 1..21: mol_type = other RNA
gagcgagcacgccccgcattt

SEQ ID NO: 258 - RNA, 21 nt, synthetic construct
  misc_feature 1..21: note = source = /note="Description of Artificial Sequence: Synthetic oligonucleotide"
  source 1..21: mol_type = other RNA
atgcggggcgtgctcgctctt

SEQ ID NO: 259 - RNA, 21 nt, synthetic construct
  misc_feature 1..21: note = source = /note="Description of Artificial Sequence: Synthetic oligonucleotide"
  source 1..21: mol_type = other RNA
tgcactgcgtcggcgtccttt

SEQ ID NO: 260 - RNA, 21 nt, synthetic construct
  misc_feature 1..21: note = source = /note="Description of Artificial Sequence: Synthetic oligonucleotide"
  source 1..21: mol_type = other RNA
aggacgccgacgcagtgcatt

SEQ ID NO: 261 - RNA, 21 nt, synthetic construct
  misc_feature 1..21: note = source = /note="Description of Artificial Sequence: Synthetic oligonucleotide"
  source 1..21: mol_type = other RNA
tggagcagactctgcaggttt

SEQ ID NO: 262 - RNA, 21 nt, synthetic construct
  misc_feature 1..21: note = source = /note="Description of Artificial Sequence: Synthetic oligonucleotide"
  source 1..21: mol_type = other RNA
acctgcagagtctgctccatt

SEQ ID NO: 263 - RNA, 21 nt, synthetic construct
  misc_feature 1..21: note = source = /note="Description of Artificial Sequence: Synthetic oligonucleotide"
  source 1..21: mol_type = other RNA
tgcaggtcctctcagatcttt

SEQ ID NO: 264 - RNA, 21 nt, synthetic construct
  misc_feature 1..21: note = source = /note="Description of Artificial Sequence: Synthetic oligonucleotide"
  source 1..21: mol_type = other RNA
agatctgagaggacctgcatt

SEQ ID NO: 265 - RNA, 21 nt, synthetic construct
  misc_feature 1..21: note = source = /note="Description of Artificial Sequence: Synthetic oligonucleotide"
  source 1..21: mol_type = other RNA
cccggccaatgtccaccattt

SEQ ID NO: 266 - RNA, 21 nt, synthetic construct
  misc_feature 1..21: note = source = /note="Description of Artificial Sequence: Synthetic oligonucleotide"
  source 1..21: mol_type = other RNA
atggtggacattggccgggtt

SEQ ID NO: 267 - RNA, 21 nt, synthetic construct
  misc_feature 1..21: note = source = /note="Description of Artificial Sequence: Synthetic oligonucleotide"
  source 1..21: mol_type = other RNA
ttctacagtggccttatcttt

SEQ ID NO: 268 - RNA, 21 nt, synthetic construct
  misc_feature 1..21: note = source = /note="Description of Artificial Sequence: Synthetic oligonucleotide"
  source 1..21: mol_type = other RNA
agataaggccactgtagaatt

SEQ ID NO: 269 - RNA, 21 nt, synthetic construct
  misc_feature 1..21: note = source = /note="Description of Artificial Sequence: Synthetic oligonucleotide"
  source 1..21: mol_type = other RNA
tctacagtggccttatccttt

SEQ ID NO: 270 - RNA, 21 nt, synthetic construct
  misc_feature 1..21: note = source = /note="Description of Artificial Sequence: Synthetic oligonucleotide"
  source 1..21: mol_type = other RNA
aggataaggccactgtagatt

SEQ ID NO: 271 - RNA, 21 nt, synthetic construct
  misc_feature 1..21: note = source = /note="Description of Artificial Sequence: Synthetic oligonucleotide"
  source 1..21: mol_type = other RNA
cttccttcagaggcgtgcttt

SEQ ID NO: 272 - RNA, 21 nt, synthetic construct
  misc_feature 1..21: note = source = /note="Description of Artificial Sequence: Synthetic oligonucleotide"
  source 1..21: mol_type = other RNA
agcacgcctctgaaggaagtt

SEQ ID NO: 273 - RNA, 21 nt, synthetic construct
  misc_feature 1..21: note = source = /note="Description of Artificial Sequence: Synthetic oligonucleotide"
  source 1..21: mol_type = other RNA
ttccttcagaggcgtgcgatt

SEQ ID NO: 274 - RNA, 21 nt, synthetic construct
  misc_feature 1..21: note = source = /note="Description of Artificial Sequence: Synthetic oligonucleotide"
  source 1..21: mol_type = other RNA
tcgcacgcctctgaaggaatt

SEQ ID NO: 275 - RNA, 21 nt, synthetic construct
  misc_feature 1..21: note = source = /note="Description of Artificial Sequence: Synthetic oligonucleotide"
  source 1..21: mol_type = other RNA
gcgtgcgatatgtggatgttt

SEQ ID NO: 276 - RNA, 21 nt, synthetic construct
  misc_feature 1..21: note = source = /note="Description of Artificial Sequence: Synthetic oligonucleotide"
  source 1..21: mol_type = other RNA
acatccacatatcgcacgctt

SEQ ID NO: 277 - RNA, 21 nt, synthetic construct
  misc_feature 1..21: note = source = /note="Description of Artificial Sequence: Synthetic oligonucleotide"
  source 1..21: mol_type = other RNA
cgtgcgatatgtggatggatt

SEQ ID NO: 278 - RNA, 21 nt, synthetic construct
  misc_feature 1..21: note = source = /note="Description of Artificial Sequence: Synthetic oligonucleotide"
  source 1..21: mol_type = other RNA
tccatccacatatcgcacgtt

SEQ ID NO: 279 - RNA, 21 nt, synthetic construct
  misc_feature 1..21: note = source = /note="Description of Artificial Sequence: Synthetic oligonucleotide"
  source 1..21: mol_type = other RNA
tggatggaggagtgagtgatt

SEQ ID NO: 280 - RNA, 21 nt, synthetic construct
  misc_feature 1..21: note = source = /note="Description of Artificial Sequence: Synthetic oligonucleotide"
  source 1..21: mol_type = other RNA
tcactcactcctccatccatt

SEQ ID NO: 281 - RNA, 21 nt, synthetic construct
  misc_feature 1..21: note = source = /note="Description of Artificial Sequence: Synthetic oligonucleotide"
  source 1..21: mol_type = other RNA
acgtacccttcattgatgttt

SEQ ID NO: 282 - RNA, 21 nt, synthetic construct
  misc_feature 1..21: note = source = /note="Description of Artificial Sequence: Synthetic oligonucleotide"
  source 1..21: mol_type = other RNA
acatcaatgaagggtacgttt

SEQ ID NO: 283 - RNA, 21 nt, synthetic construct
  misc_feature 1..21: note = source = /note="Description of Artificial Sequence: Synthetic oligonucleotide"
  source 1..21: mol_type = other RNA
tggacatcaccaagctcattt

SEQ ID NO: 284 - RNA, 21 nt, synthetic construct
  misc_feature 1..21: note = source = /note="Description of Artificial Sequence: Synthetic oligonucleotide"
  source 1..21: mol_type = other RNA
atgagcttggtgatgtccatt

SEQ ID NO: 285 - RNA, 21 nt, synthetic construct
  misc_feature 1..21: note = source = /note="Description of Artificial Sequence: Synthetic oligonucleotide"
  source 1..21: mol_type = other RNA
cacctgcgtctcagcatcttt

SEQ ID NO: 286 - RNA, 21 nt, synthetic construct
  misc_feature 1..21: note = source = /note="Description of Artificial Sequence: Synthetic oligonucleotide"
  source 1..21: mol_type = other RNA
agatgctgagacgcaggtgtt

SEQ ID NO: 287 - RNA, 21 nt, synthetic construct
  misc_feature 1..21: note = source = /note="Description of Artificial Sequence: Synthetic oligonucleotide"
  source 1..21: mol_type = other RNA
acctgcgtctcagcatccttt

SEQ ID NO: 288 - RNA, 21 nt, synthetic construct
  misc_feature 1..21: note = source = /note="Description of Artificial Sequence: Synthetic oligonucleotide"
  source 1..21: mol_type = other RNA
aggatgctgagacgcaggttt

SEQ ID NO: 289 - RNA, 21 nt, synthetic construct
  misc_feature 1..21: note = source = /note="Description of Artificial Sequence: Synthetic oligonucleotide"
  source 1..21: mol_type = other RNA
ccagagactggtgacatgttt

SEQ ID NO: 290 - RNA, 21 nt, synthetic construct
  misc_feature 1..21: note = source = /note="Description of Artificial Sequence: Synthetic oligonucleotide"
  source 1..21: mol_type = other RNA
acatgtcaccagtctctggtt

SEQ ID NO: 291 - RNA, 21 nt, synthetic construct
  misc_feature 1..21: note = source = /note="Description of Artificial Sequence: Synthetic oligonucleotide"
  source 1..21: mol_type = other RNA
atggcttccagatatgccttt

SEQ ID NO: 292 - RNA, 21 nt, synthetic construct
  misc_feature 1..21: note = source = /note="Description of Artificial Sequence: Synthetic oligonucleotide"
  source 1..21: mol_type = other RNA
aggcatatctggaagccattt

SEQ ID NO: 293 - RNA, 21 nt, synthetic construct
  misc_feature 1..21: note = source = /note="Description of Artificial Sequence: Synthetic oligonucleotide"
  source 1..21: mol_type = other RNA
ccgcctccaggtcccaaattt

SEQ ID NO: 294 - RNA, 21 nt, synthetic construct
  misc_feature 1..21: note = source = /note="Description of Artificial Sequence: Synthetic oligonucleotide"
  source 1..21: mol_type = other RNA
atttgggacctggaggcggtt

SEQ ID NO: 295 - RNA, 21 nt, synthetic construct
  misc_feature 1..21: note = source = /note="Description of Artificial Sequence: Synthetic oligonucleotide"
  source 1..21: mol_type = other RNA
tacctgctggtgctgaggttt

SEQ ID NO: 296 - RNA, 21 nt, synthetic construct
  misc_feature 1..21: note = source = /note="Description of Artificial Sequence: Synthetic oligonucleotide"
  source 1..21: mol_type = other RNA
acctcagcaccagcaggtatt

SEQ ID NO: 297 - RNA, 21 nt, synthetic construct
  misc_feature 1..21: note = source = /note="Description of Artificial Sequence: Synthetic oligonucleotide"
  source 1..21: mol_type = other RNA
acctgctggtgctgagggttt

SEQ ID NO: 298 - RNA, 21 nt, synthetic construct
  misc_feature 1..21: note = source = /note="Description of Artificial Sequence: Synthetic oligonucleotide"
  source 1..21: mol_type = other RNA
accctcagcaccagcaggttt

SEQ ID NO: 299 - RNA, 21 nt, synthetic construct
  misc_feature 1..21: note = source = /note="Description of Artificial Sequence: Synthetic oligonucleotide"
  source 1..21: mol_type = other RNA
ctctccacctttcccagtttt

SEQ ID NO: 300 - RNA, 21 nt, synthetic construct
  misc_feature 1..21: note = source = /note="Description of Artificial Sequence: Synthetic oligonucleotide"
  source 1..21: mol_type = other RNA
aactgggaaaggtggagagtt

SEQ ID NO: 301 - RNA, 21 nt, synthetic construct
  misc_feature 1..21: note = source = /note="Description of Artificial Sequence: Synthetic oligonucleotide"
  source 1..21: mol_type = other RNA
tttttcacctaactaaaattt

SEQ ID NO: 302 - RNA, 21 nt, synthetic construct
  misc_feature 1..21: note = source = /note="Description of Artificial Sequence: Synthetic oligonucleotide"
  source 1..21: mol_type = other RNA
attttagttaggtgaaaaatt

SEQ ID NO: 303 - RNA, 21 nt, synthetic construct
  misc_feature 1..21: note = source = /note="Description of Artificial Sequence: Synthetic oligonucleotide"
  source 1..21: mol_type = other RNA
cggccaatgtccaccagcttt

SEQ ID NO: 304 - RNA, 21 nt, synthetic construct
  misc_feature 1..21: note = source = /note="Description of Artificial Sequence: Synthetic oligonucleotide"
  source 1..21: mol_type = other RNA
agctggtggacattggccgtt

SEQ ID NO: 305 - RNA, 21 nt, synthetic construct
  misc_feature 1..21: note = source = /note="Description of Artificial Sequence: Synthetic oligonucleotide"
  source 1..21: mol_type = other RNA
ggtccagcctgaacttctttt

SEQ ID NO: 306 - RNA, 21 nt, synthetic construct
  misc_feature 1..21: note = source = /note="Description of Artificial Sequence: Synthetic oligonucleotide"
  source 1..21: mol_type = other RNA
aagaagttcaggctggacctt

SEQ ID NO: 307 - RNA, 21 nt, synthetic construct
  misc_feature 1..21: note = source = /note="Description of Artificial Sequence: Synthetic oligonucleotide"
  source 1..21: mol_type = other RNA
gcggcttcctgggcttctatt

SEQ ID NO: 308 - RNA, 21 nt, synthetic construct
  misc_feature 1..21: note = source = /note="Description of Artificial Sequence: Synthetic oligonucleotide"
  source 1..21: mol_type = other RNA
tagaagcccaggaagccgctt

SEQ ID NO: 309 - RNA, 21 nt, synthetic construct
  misc_feature 1..21: note = source = /note="Description of Artificial Sequence: Synthetic oligonucleotide"
  source 1..21: mol_type = other RNA
gtgacaacgtacccttcattt

SEQ ID NO: 310 - RNA, 21 nt, synthetic construct
  misc_feature 1..21: note = source = /note="Description of Artificial Sequence: Synthetic oligonucleotide"
  source 1..21: mol_type = other RNA
atgaagggtacgttgtcactt

SEQ ID NO: 311 - RNA, 21 nt, synthetic construct
  misc_feature 1..21: note = source = /note="Description of Artificial Sequence: Synthetic oligonucleotide"
  source 1..21: mol_type = other RNA
ggtatgttcctgcttcatgtt

SEQ ID NO: 312 - RNA, 21 nt, synthetic construct
  misc_feature 1..21: note = source = /note="Description of Artificial Sequence: Synthetic oligonucleotide"
  source 1..21: mol_type = other RNA
catgaagcaggaacatacctt

SEQ ID NO: 313 - RNA, 21 nt, synthetic construct
  misc_feature 1..21: note = source = /note="Description of Artificial Sequence: Synthetic oligonucleotide"
  source 1..21: mol_type = other RNA
gtatgttcctgcttcatgctt

SEQ ID NO: 314 - RNA, 21 nt, synthetic construct
  misc_feature 1..21: note = source = /note="Description of Artificial Sequence: Synthetic oligonucleotide"
  source 1..21: mol_type = other RNA
gcatgaagcaggaacatactt

SEQ ID NO: 315 - RNA, 21 nt, synthetic construct
  misc_feature 1..21: note = source = /note="Description of Artificial Sequence: Synthetic oligonucleotide"
  source 1..21: mol_type = other RNA
tgttcctgcttcatgcccttt

SEQ ID NO: 316 - RNA, 21 nt, synthetic construct
  misc_feature 1..21: note = source = /note="Description of Artificial Sequence: Synthetic oligonucleotide"
  source 1..21: mol_type = other RNA
agggcatgaagcaggaacatt

SEQ ID NO: 317 - RNA, 21 nt, synthetic construct
  misc_feature 1..21: note = source = /note="Description of Artificial Sequence: Synthetic oligonucleotide"
  source 1..21: mol_type = other RNA
gttcctgcttcatgccctttt

SEQ ID NO: 318 - RNA, 21 nt, synthetic construct
  misc_feature 1..21: note = source = /note="Description of Artificial Sequence: Synthetic oligonucleotide"
  source 1..21: mol_type = other RNA
aagggcatgaagcaggaactt

SEQ ID NO: 319 - RNA, 21 nt, synthetic construct
  misc_feature 1..21: note = source = /note="Description of Artificial Sequence: Synthetic oligonucleotide"
  source 1..21: mol_type = other RNA
cctgcttcatgcccttctatt

SEQ ID NO: 320 - RNA, 21 nt, synthetic construct
  misc_feature 1..21: note = source = /note="Description of Artificial Sequence: Synthetic oligonucleotide"
  source 1..21: mol_type = other RNA
tagaagggcatgaagcaggtt

SEQ ID NO: 321 - RNA, 21 nt, synthetic construct
  misc_feature 1..21: note = source = /note="Description of Artificial Sequence: Synthetic oligonucleotide"
  source 1..21: mol_type = other RNA
gcttcatgcccttctacagtt

SEQ ID NO: 322 - RNA, 21 nt, synthetic construct
  misc_feature 1..21: note = source = /note="Description of Artificial Sequence: Synthetic oligonucleotide"
  source 1..21: mol_type = other RNA
ctgtagaagggcatgaagctt

SEQ ID NO: 323 - RNA, 21 nt, synthetic construct
  misc_feature 1..21: note = source = /note="Description of Artificial Sequence: Synthetic oligonucleotide"
  source 1..21: mol_type = other RNA
cttcatgcccttctacagttt

SEQ ID NO: 324 - RNA, 21 nt, synthetic construct
  misc_feature 1..21: note = source = /note="Description of Artificial Sequence: Synthetic oligonucleotide"
  source 1..21: mol_type = other RNA
actgtagaagggcatgaagtt

SEQ ID NO: 325 - RNA, 21 nt, synthetic construct
  misc_feature 1..21: note = source = /note="Description of Artificial Sequence: Synthetic oligonucleotide"
  source 1..21: mol_type = other RNA
ttcatgcccttctacagtgtt

SEQ ID NO: 326 - RNA, 21 nt, synthetic construct
  misc_feature 1..21: note = source = /note="Description of Artificial Sequence: Synthetic oligonucleotide"
  source 1..21: mol_type = other RNA
cactgtagaagggcatgaatt

SEQ ID NO: 327 - RNA, 21 nt, synthetic construct
  misc_feature 1..21: note = source = /note="Description of Artificial Sequence: Synthetic oligonucleotide"
  source 1..21: mol_type = other RNA
atggcttccagatatgccttt

SEQ ID NO: 328 - RNA, 21 nt, synthetic construct
  misc_feature 1..21: note = source = /note="Description of Artificial Sequence: Synthetic oligonucleotide"
  source 1..21: mol_type = other RNA
aggcatatctggaagccattt

SEQ ID NO: 329 - RNA, 21 nt, synthetic construct
  misc_feature 1..21: note = source = /note="Description of Artificial Sequence: Synthetic oligonucleotide"
  source 1..21: mol_type = other RNA
atgcccttctacagtggcctt

SEQ ID NO: 330 - RNA, 21 nt, synthetic construct
  misc_feature 1..21: note = source = /note="Description of Artificial Sequence: Synthetic oligonucleotide"
  source 1..21: mol_type = other RNA
ggccactgtagaagggcattt

SEQ ID NO: 331 - RNA, 21 nt, synthetic construct
  misc_feature 1..21: note = source = /note="Description of Artificial Sequence: Synthetic oligonucleotide"
  source 1..21: mol_type = other RNA
gcttcatgcccttctacattt

SEQ ID NO: 332 - RNA, 21 nt, synthetic construct
  misc_feature 1..21: note = source = /note="Description of Artificial Sequence: Synthetic oligonucleotide"
  source 1..21: mol_type = other RNA
atgtagaagggcatgaagctt

SEQ ID NO: 333 - RNA, 21 nt, synthetic construct
  misc_feature 1..21: note = source = /note="Description of Artificial Sequence: Synthetic oligonucleotide"
  source 1..21: mol_type = other RNA
ggaaagactgttccaaaaatt

SEQ ID NO: 334 - RNA, 21 nt, synthetic construct
  misc_feature 1..21: note = source = /note="Description of Artificial Sequence: Synthetic oligonucleotide"
  source 1..21: mol_type = other RNA
tttttggaacagtctttcctt

SEQ ID NO: 335 - RNA, 21 nt, synthetic construct
  misc_feature 1..21: note = source = /note="Description of Artificial Sequence: Synthetic oligonucleotide"
  source 1..21: mol_type = other RNA
ggtatgttcctgcttcatgtt

SEQ ID NO: 336 - RNA, 21 nt, synthetic construct
  misc_feature 1..21: note = source = /note="Description of Artificial Sequence: Synthetic oligonucleotide"
  source 1..21: mol_type = other RNA
catgaagcaggaacatacctt

SEQ ID NO: 337 - RNA, 21 nt, synthetic construct
  misc_feature 1..21: note = source = /note="Description of Artificial Sequence: Synthetic oligonucleotide"
  source 1..21: mol_type = other RNA
gtatgttcctgcttcatgctt

SEQ ID NO: 338 - RNA, 21 nt, synthetic construct
  misc_feature 1..21: note = source = /note="Description of Artificial Sequence: Synthetic oligonucleotide"
  source 1..21: mol_type = other RNA
gcatgaagcaggaacatactt

SEQ ID NO: 339 - RNA, 21 nt, synthetic construct
  misc_feature 1..21: note = source = /note="Description of Artificial Sequence: Synthetic oligonucleotide"
  source 1..21: mol_type = other RNA
tgttcctgcttcatgcccttt

SEQ ID NO: 340 - RNA, 21 nt, synthetic construct
  misc_feature 1..21: note = source = /note="Description of Artificial Sequence: Synthetic oligonucleotide"
  source 1..21: mol_type = other RNA
agggcatgaagcaggaacatt

SEQ ID NO: 341 - RNA, 21 nt, synthetic construct
  misc_feature 1..21: note = source = /note="Description of Artificial Sequence: Synthetic oligonucleotide"
  source 1..21: mol_type = other RNA
gcttcatgcccttctacagtt

SEQ ID NO: 342 - RNA, 21 nt, synthetic construct
  misc_feature 1..21: note = source = /note="Description of Artificial Sequence: Synthetic oligonucleotide"
  source 1..21: mol_type = other RNA
ctgtagaagggcatgaagctt

SEQ ID NO: 343 - RNA, 21 nt, synthetic construct
  misc_feature 1..21: note = source = /note="Description of Artificial Sequence: Synthetic oligonucleotide"
  source 1..21: mol_type = other RNA
cttcatgcccttctacagttt

SEQ ID NO: 344 - RNA, 21 nt, synthetic construct
  misc_feature 1..21: note = source = /note="Description of Artificial Sequence: Synthetic oligonucleotide"
  source 1..21: mol_type = other RNA
actgtagaagggcatgaagtt

SEQ ID NO: 345 - RNA, 21 nt, synthetic construct
  misc_feature 1..21: note = source = /note="Description of Artificial Sequence: Synthetic oligonucleotide"
  source 1..21: mol_type = other RNA
gcggcttcctgggcttctatt

SEQ ID NO: 346 - RNA, 21 nt, synthetic construct
  misc_feature 1..21: note = source = /note="Description of Artificial Sequence: Synthetic oligonucleotide"
  source 1..21: mol_type = other RNA
tagaagcccaggaagccgctt

SEQ ID NO: 347 - RNA, 21 nt, synthetic construct
  misc_feature 1..21: note = source = /note="Description of Artificial Sequence: Synthetic oligonucleotide"
  source 1..21: mol_type = other RNA
gttcctgcttcatgccctttt

SEQ ID NO: 348 - RNA, 21 nt, synthetic construct
  misc_feature 1..21: note = source = /note="Description of Artificial Sequence: Synthetic oligonucleotide"
  source 1..21: mol_type = other RNA
aagggcatgaagcaggaactt

SEQ ID NO: 349 - RNA, 21 nt, synthetic construct
  misc_feature 1..21: note = source = /note="Description of Artificial Sequence: Synthetic oligonucleotide"
  source 1..21: mol_type = other RNA
atggcttccagatatgccttt

SEQ ID NO: 350 - RNA, 21 nt, synthetic construct
  misc_feature 1..21: note = source = /note="Description of Artificial Sequence: Synthetic oligonucleotide"
  source 1..21: mol_type = other RNA
aggcatatctggaagccattt

SEQ ID NO: 351 - RNA, 21 nt, synthetic construct
  misc_feature 1..21: note = source = /note="Description of Artificial Sequence: Synthetic oligonucleotide"
  source 1..21: mol_type = other RNA
cctgcttcatgcccttctatt

SEQ ID NO: 352 - RNA, 21 nt, synthetic construct
  misc_feature 1..21: note = source = /note="Description of Artificial Sequence: Synthetic oligonucleotide"
  source 1..21: mol_type = other RNA
tagaagggcatgaagcaggtt

SEQ ID NO: 353 - RNA, 21 nt, synthetic construct
  misc_feature 1..21: note = source = /note="Description of Artificial Sequence: Synthetic oligonucleotide"
  source 1..21: mol_type = other RNA
ttcatgcccttctacagtttt

SEQ ID NO: 354 - RNA, 21 nt, synthetic construct
  misc_feature 1..21: note = source = /note="Description of Artificial Sequence: Synthetic oligonucleotide"
  source 1..21: mol_type = other RNA
aactgtagaagggcatgaatt

SEQ ID NO: 355 - RNA, 21 nt, synthetic construct
  misc_feature 1..21: note = source = /note="Description of Artificial Sequence: Synthetic oligonucleotide"
  source 1..21: mol_type = other RNA
ttcatgcccttctacagtgtt

SEQ ID NO: 356 - RNA, 21 nt, synthetic construct
  misc_feature 1..21: note = source = /note="Description of Artificial Sequence: Synthetic oligonucleotide"
  source 1..21: mol_type = other RNA
cactgtagaagggcatgaatt

SEQ ID NO: 357 - RNA, 21 nt, synthetic construct
  misc_feature 1..21: note = source = /note="Description of Artificial Sequence: Synthetic oligonucleotide"
  source 1..21: mol_type = other RNA
gcttcatgcccttctacattt

SEQ ID NO: 358 - RNA, 21 nt, synthetic construct
  misc_feature 1..21: note = source = /note="Description of Artificial Sequence: Synthetic oligonucleotide"
  source 1..21: mol_type = other RNA
atgtagaagggcatgaagctt

SEQ ID NO: 359 - RNA, 21 nt, synthetic construct
  misc_feature 1..21: note = source = /note="Description of Artificial Sequence: Synthetic oligonucleotide"
  source 1..21: mol_type = other RNA
ggtccagcctgaacttctttt

SEQ ID NO: 360 - RNA, 21 nt, synthetic construct
  misc_feature 1..21: note = source = /note="Description of Artificial Sequence: Synthetic oligonucleotide"
  source 1..21: mol_type = other RNA
aagaagttcaggctggacctt

SEQ ID NO: 361 - RNA, 21 nt, synthetic construct
  misc_feature 1..21: note = source = /note="Description of Artificial Sequence: Synthetic oligonucleotide"
  source 1..21: mol_type = other RNA
gcggcttcctgggcttctatt

SEQ ID NO: 362 - RNA, 21 nt, synthetic construct
  misc_feature 1..21: note = source = /note="Description of Artificial Sequence: Synthetic oligonucleotide"
  source 1..21: mol_type = other RNA
tagaagcccaggaagccgctt

SEQ ID NO: 363 - RNA, 21 nt, synthetic construct
  misc_feature 1..21: note = source = /note="Description of Artificial Sequence: Synthetic oligonucleotide"
  source 1..21: mol_type = other RNA
gcggcttcctgggcttctatt

SEQ ID NO: 364 - RNA, 21 nt, synthetic construct
  misc_feature 1..21: note = source = /note="Description of Artificial Sequence: Synthetic oligonucleotide"
  source 1..21: mol_type = other RNA
tagaagcccaggaagccgctt

SEQ ID NO: 365 - RNA, 21 nt, synthetic construct
  misc_feature 1..21: note = source = /note="Description of Artificial Sequence: Synthetic oligonucleotide"
  source 1..21: mol_type = other RNA
gttcctgcttcatgccctttt

SEQ ID NO: 366 - RNA, 21 nt, synthetic construct
  misc_feature 1..21: note = source = /note="Description of Artificial Sequence: Synthetic oligonucleotide"
  source 1..21: mol_type = other RNA
aagggcatgaagcaggaactt

SEQ ID NO: 367 - RNA, 21 nt, synthetic construct
  misc_feature 1..21: note = source = /note="Description of Artificial Sequence: Synthetic oligonucleotide"
  source 1..21: mol_type = other RNA
gttcctgcttcatgccctttt

SEQ ID NO: 368 - RNA, 21 nt, synthetic construct
  misc_feature 1..21: note = source = /note="Description of Artificial Sequence: Synthetic oligonucleotide"
  source 1..21: mol_type = other RNA
aagggcatgaagcaggaactt

SEQ ID NO: 369 - RNA, 21 nt, synthetic construct
  misc_feature 1..21: note = source = /note="Description of Artificial Sequence: Synthetic oligonucleotide"
  source 1..21: mol_type = other RNA
cctgcttcatgcccttctatt

SEQ ID NO: 370 - RNA, 21 nt, synthetic construct
  misc_feature 1..21: note = source = /note="Description of Artificial Sequence: Synthetic oligonucleotide"
  source 1..21: mol_type = other RNA
tagaagggcatgaagcaggtt

SEQ ID NO: 371 - RNA, 21 nt, synthetic construct
  misc_feature 1..21: note = source = /note="Description of Artificial Sequence: Synthetic oligonucleotide"
  source 1..21: mol_type = other RNA
cctgcttcatgcccttctatt

SEQ ID NO: 372 - RNA, 21 nt, synthetic construct
  misc_feature 1..21: note = source = /note="Description of Artificial Sequence: Synthetic oligonucleotide"
  source 1..21: mol_type = other RNA
tagaagggcatgaagcaggtt

SEQ ID NO: 373 - RNA, 21 nt, synthetic construct
  misc_feature 1..21: note = source = /note="Description of Artificial Sequence: Synthetic oligonucleotide"
  source 1..21: mol_type = other RNA
atgcccttctacagtggcctt

SEQ ID NO: 374 - RNA, 21 nt, synthetic construct
  misc_feature 1..21: note = source = /note="Description of Artificial Sequence: Synthetic oligonucleotide"
  source 1..21: mol_type = other RNA
ggccactgtagaagggcattt

SEQ ID NO: 375 - RNA, 21 nt, synthetic construct
  misc_feature 1..21: note = source = /note="Description of Artificial Sequence: Synthetic oligonucleotide"
  source 1..21: mol_type = other RNA
atggcttccagatatgccttt

SEQ ID NO: 376 - RNA, 21 nt, synthetic construct
  misc_feature 1..21: note = source = /note="Description of Artificial Sequence: Synthetic oligonucleotide"
  source 1..21: mol_type = other RNA
aggcatatctggaagccattt

SEQ ID NO: 377 - RNA, 21 nt, synthetic construct
  misc_feature 1..21: note = source = /note="Description of Artificial Sequence: Synthetic oligonucleotide"
  source 1..21: mol_type = other RNA
gtgacaacgtacccttcattt

SEQ ID NO: 378 - RNA, 21 nt, synthetic construct
  misc_feature 1..21: note = source = /note="Description of Artificial Sequence: Synthetic oligonucleotide"
  source 1..21: mol_type = other RNA
atgaagggtacgttgtcactt

SEQ ID NO: 379 - RNA, 21 nt, synthetic construct
  misc_feature 1..21: note = source = /note="Description of Artificial Sequence: Synthetic oligonucleotide"
  source 1..21: mol_type = other RNA
gtatgttcctgcttcatgctt

SEQ ID NO: 380 - RNA, 21 nt, synthetic construct
  misc_feature 1..21: note = source = /note="Description of Artificial Sequence: Synthetic oligonucleotide"
  source 1..21: mol_type = other RNA
gcatgaagcaggaacatactt

SEQ ID NO: 381 - RNA, 21 nt, synthetic construct
  misc_feature 1..21: note = source = /note="Description of Artificial Sequence: Synthetic oligonucleotide"
  source 1..21: mol_type = other RNA
gtatgttcctgcttcatgctt

SEQ ID NO: 382 - RNA, 21 nt, synthetic construct
  misc_feature 1..21: note = source = /note="Description of Artificial Sequence: Synthetic oligonucleotide"
  source 1..21: mol_type = other RNA
gcatgaagcaggaacatactt

SEQ ID NO: 383 - RNA, 21 nt, synthetic construct
  misc_feature 1..21: note = source = /note="Description of Artificial Sequence: Synthetic oligonucleotide"
  source 1..21: mol_type = other RNA
gtatgttcctgcttcatgctt

SEQ ID NO: 384 - RNA, 21 nt, synthetic construct
  misc_feature 1..21: note = source = /note="Description of Artificial Sequence: Synthetic oligonucleotide"
  source 1..21: mol_type = other RNA
gcatgaagcaggaacatactt

SEQ ID NO: 385 - RNA, 21 nt, synthetic construct
  misc_feature 1..21: note = source = /note="Description of Artificial Sequence: Synthetic oligonucleotide"
  source 1..21: mol_type = other RNA
gtatgttcctgcttcatgcct

SEQ ID NO: 386 - RNA, 23 nt, synthetic construct
  misc_feature 1..23: note = source = /note="Description of Artificial Sequence: Synthetic oligonucleotide"
  source 1..23: mol_type = other RNA
aggcatgaagcaggaacatactt

SEQ ID NO: 387 - RNA, 21 nt, synthetic construct
  misc_feature 1..21: note = source = /note="Description of Artificial Sequence: Synthetic oligonucleotide"
  source 1..21: mol_type = other RNA
tggtatgttcctgcttcatgt

SEQ ID NO: 388 - RNA, 23 nt, synthetic construct
  misc_feature 1..23: note = source = /note="Description of Artificial Sequence: Synthetic oligonucleotide"
  source 1..23: mol_type = other RNA
gcatgaagcaggaacataccatt

SEQ ID NO: 389 - RNA, 19 nt, synthetic construct
  misc_feature 1..19: note = source = /note="Description of Artificial Sequence: Synthetic oligonucleotide"
  source 1..19: mol_type = other RNA
gtatgttcctgcttcatgt

SEQ ID NO: 390 - RNA, 21 nt, synthetic construct
  misc_feature 1..21: note = source = /note="Description of Artificial Sequence: Synthetic oligonucleotide"
  source 1..21: mol_type = other RNA
gcatgaagcaggaacatactt

SEQ ID NO: 391 - RNA, 20 nt, synthetic construct
  modified_base 20: mod_base = OTHER; note = Inverted abasic nucleotide
  misc_feature 1..20: note = source = /note="Description of Artificial Sequence: Synthetic oligonucleotide"
  source 1..20: mol_type = other RNA
gtatgttcctgcttcatgcn

SEQ ID NO: 392 - RNA, 21 nt, synthetic construct
  misc_feature 1..21: note = source = /note="Description of Artificial Sequence: Synthetic oligonucleotide"
  source 1..21: mol_type = other RNA
gcatgaagcaggaacatactt

SEQ ID NO: 393 - RNA, 21 nt, synthetic construct
  misc_feature 1..21: note = source = /note="Description of Artificial Sequence: Synthetic oligonucleotide"
  source 1..21: mol_type = other RNA
gcttcatgcccttctacattt

SEQ ID NO: 394 - RNA, 21 nt, synthetic construct
  misc_feature 1..21: note = source = /note="Description of Artificial Sequence: Synthetic oligonucleotide"
  source 1..21: mol_type = other RNA
atgtagaagggcatgaagctt

SEQ ID NO: 395 - RNA, 21 nt, synthetic construct
  misc_feature 1..21: note = source = /note="Description of Artificial Sequence: Synthetic oligonucleotide"
  source 1..21: mol_type = other RNA
gcttcatgcccttctacattt

SEQ ID NO: 396 - RNA, 21 nt, synthetic construct
  misc_feature 1..21: note = source = /note="Description of Artificial Sequence: Synthetic oligonucleotide"
  source 1..21: mol_type = other RNA
atgtagaagggcatgaagctt

SEQ ID NO: 397 - RNA, 21 nt, synthetic construct
  misc_feature 1..21: note = source = /note="Description of Artificial Sequence: Synthetic oligonucleotide"
  source 1..21: mol_type = other RNA
gcttcatgcccttctacattt

SEQ ID NO: 398 - RNA, 21 nt, synthetic construct
  misc_feature 1..21: note = source = /note="Description of Artificial Sequence: Synthetic oligonucleotide"
  source 1..21: mol_type = other RNA
atgtagaagggcatgaagctt

SEQ ID NO: 399 - RNA, 21 nt, synthetic construct
  misc_feature 1..21: note = source = /note="Description of Artificial Sequence: Synthetic oligonucleotide"
  source 1..21: mol_type = other RNA
gcttcatgcccttctacattt

SEQ ID NO: 400 - RNA, 21 nt, synthetic construct
  misc_feature 1..21: note = source = /note="Description of Artificial Sequence: Synthetic oligonucleotide"
  source 1..21: mol_type = other RNA
atgtagaagggcatgaagctt

SEQ ID NO: 401 - RNA, 21 nt, synthetic construct
  misc_feature 1..21: note = source = /note="Description of Artificial Sequence: Synthetic oligonucleotide"
  source 1..21: mol_type = other RNA
gcttcatgcccttctacattt

SEQ ID NO: 402 - RNA, 21 nt, synthetic construct
  misc_feature 1..21: note = source = /note="Description of Artificial Sequence: Synthetic oligonucleotide"
  source 1..21: mol_type = other RNA
atgtagaagggcatgaagctt

SEQ ID NO: 403 - RNA, 21 nt, synthetic construct
  misc_feature 1..21: note = source = /note="Description of Artificial Sequence: Synthetic oligonucleotide"
  source 1..21: mol_type = other RNA
gcttcatgcccttctacattt

SEQ ID NO: 404 - RNA, 21 nt, synthetic construct
  misc_feature 1..21: note = source = /note="Description of Artificial Sequence: Synthetic oligonucleotide"
  source 1..21: mol_type = other RNA
atgtagaagggcatgaagctt

SEQ ID NO: 405 - RNA, 21 nt, synthetic construct
  misc_feature 1..21: note = source = /note="Description of Artificial Sequence: Synthetic oligonucleotide"
  source 1..21: mol_type = other RNA
gcttcatgcccttctacattt

SEQ ID NO: 406 - RNA, 21 nt, synthetic construct
  misc_feature 1..21: note = source = /note="Description of Artificial Sequence: Synthetic oligonucleotide"
  source 1..21: mol_type = other RNA
atgtagaagggcatgaagctt

SEQ ID NO: 407 - RNA, 21 nt, synthetic construct
  misc_feature 1..21: note = source = /note="Description of Artificial Sequence: Synthetic oligonucleotide"
  source 1..21: mol_type = other RNA
gcttcatgcccttctacattt

SEQ ID NO: 408 - RNA, 21 nt, synthetic construct
  misc_feature 1..21: note = source = /note="Description of Artificial Sequence: Synthetic oligonucleotide"
  source 1..21: mol_type = other RNA
atgtagaagggcatgaagctt

SEQ ID NO: 409 - RNA, 21 nt, synthetic construct
  misc_feature 1..21: note = source = /note="Description of Artificial Sequence: Synthetic oligonucleotide"
  source 1..21: mol_type = other RNA
gcttcatgcccttctacattt

SEQ ID NO: 410 - RNA, 21 nt, synthetic construct
  misc_feature 1..21: note = source = /note="Description of Artificial Sequence: Synthetic oligonucleotide"
  source 1..21: mol_type = other RNA
atgtagaagggcatgaagctt

SEQ ID NO: 411 - RNA, 21 nt, synthetic construct
  misc_feature 1..21: note = source = /note="Description of Artificial Sequence: Synthetic oligonucleotide"
  source 1..21: mol_type = other RNA
gcttcatgcccttctacattt

SEQ ID NO: 412 - RNA, 21 nt, synthetic construct
  misc_feature 1..21: note = source = /note="Description of Artificial Sequence: Synthetic oligonucleotide"
  source 1..21: mol_type = other RNA
atgtagaagggcatgaagctt

SEQ ID NO: 413 - RNA, 21 nt, synthetic construct
  misc_feature 1..21: note = source = /note="Description of Artificial Sequence: Synthetic oligonucleotide"
  source 1..21: mol_type = other RNA
gcttcatgcccttctacattt

SEQ ID NO: 414 - RNA, 21 nt, synthetic construct
  misc_feature 1..21: note = source = /note="Description of Artificial Sequence: Synthetic oligonucleotide"
  source 1..21: mol_type = other RNA
atgtagaagggcatgaagctt

SEQ ID NO: 415 - RNA, 21 nt, synthetic construct
  misc_feature 1..21: note = source = /note="Description of Artificial Sequence: Synthetic oligonucleotide"
  source 1..21: mol_type = other RNA
gcttcatgcccttctacattt

SEQ ID NO: 416 - RNA, 21 nt, synthetic construct
  misc_feature 1..21: note = source = /note="Description of Artificial Sequence: Synthetic oligonucleotide"
  source 1..21: mol_type = other RNA
atgtagaagggcatgaagctt

SEQ ID NO: 417 - RNA, 21 nt, synthetic construct
  misc_feature 1..21: note = source = /note="Description of Artificial Sequence: Synthetic oligonucleotide"
  source 1..21: mol_type = other RNA
gcttcatgcccttctacattt

SEQ ID NO: 418 - RNA, 21 nt, synthetic construct
  misc_feature 1..21: note = source = /note="Description of Artificial Sequence: Synthetic oligonucleotide"
  source 1..21: mol_type = other RNA
atgtagaagggcatgaagctt

SEQ ID NO: 419 - RNA, 21 nt, synthetic construct
  misc_feature 1..21: note = source = /note="Description of Artificial Sequence: Synthetic oligonucleotide"
  source 1..21: mol_type = other RNA
gcttcatgcccttctacattt

SEQ ID NO: 420 - RNA, 21 nt, synthetic construct
  misc_feature 1..21: note = source = /note="Description of Artificial Sequence: Synthetic oligonucleotide"
  source 1..21: mol_type = other RNA
atgtagaagggcatgaagctt

SEQ ID NO: 421 - RNA, 21 nt, synthetic construct
  misc_feature 1..21: note = source = /note="Description of Artificial Sequence: Synthetic oligonucleotide"
  source 1..21: mol_type = other RNA
gcttcatgcccttctacattt

SEQ ID NO: 422 - RNA, 21 nt, synthetic construct
  misc_feature 1..21: note = source = /note="Description of Artificial Sequence: Synthetic oligonucleotide"
  source 1..21: mol_type = other RNA
atgtagaagggcatgaagctt

SEQ ID NO: 423 - RNA, 21 nt, synthetic construct
  misc_feature 1..21: note = source = /note="Description of Artificial Sequence: Synthetic oligonucleotide"
  source 1..21: mol_type = other RNA
gcttcatgcccttctacattt

SEQ ID NO: 424 - RNA, 21 nt, synthetic construct
  misc_feature 1..21: note = source = /note="Description of Artificial Sequence: Synthetic oligonucleotide"
  source 1..21: mol_type = other RNA
atgtagaagggcatgaagctt

SEQ ID NO: 425 - DNA, 21 bp, synthetic construct
  misc_feature 1..21: note = source = /note="Description of Artificial Sequence: Synthetic oligonucleotide"
  misc_feature 1..21: note = source = /note="Description of Combined DNA/RNA Molecule: Synthetic oligonucleotide"
  source 1..21: mol_type = other DNA
gcttcatgcccttctacattt

SEQ ID NO: 426 - RNA, 21 nt, synthetic construct
  misc_feature 1..21: note = source = /note="Description of Artificial Sequence: Synthetic oligonucleotide"
  source 1..21: mol_type = other RNA
atgtagaagggcatgaagctt

SEQ ID NO: 427 - DNA, 21 bp, synthetic construct
  misc_feature 1..21: note = source = /note="Description of Artificial Sequence: Synthetic oligonucleotide"
  misc_feature 1..21: note = source = /note="Description of Combined DNA/RNA Molecule: Synthetic oligonucleotide"
  source 1..21: mol_type = other DNA
gcttcatgcccttctacattt

SEQ ID NO: 428 - RNA, 21 nt, synthetic construct
  misc_feature 1..21: note = source = /note="Description of Artificial Sequence: Synthetic oligonucleotide"
  source 1..21: mol_type = other RNA
atgtagaagggcatgaagctt

SEQ ID NO: 429 - DNA, 21 bp, synthetic construct
  misc_feature 1..21: note = source = /note="Description of Artificial Sequence: Synthetic oligonucleotide"
  misc_feature 1..21: note = source = /note="Description of Combined DNA/RNA Molecule: Synthetic oligonucleotide"
  source 1..21: mol_type = other DNA
gcttcatgcccttctacattt

SEQ ID NO: 430 - RNA, 21 nt, synthetic construct
  misc_feature 1..21: note = source = /note="Description of Artificial Sequence: Synthetic oligonucleotide"
  source 1..21: mol_type = other RNA
atgtagaagggcatgaagctt

SEQ ID NO: 431 - RNA, 21 nt, synthetic construct
  misc_feature 1..21: note = source = /note="Description of Artificial Sequence: Synthetic oligonucleotide"
  source 1..21: mol_type = other RNA
gcttcatgcccttctacattt

SEQ ID NO: 432 - RNA, 21 nt, synthetic construct
  misc_feature 1..21: note = source = /note="Description of Artificial Sequence: Synthetic oligonucleotide"
  source 1..21: mol_type = other RNA
atgtagaagggcatgaagctt

SEQ ID NO: 433 - RNA, 21 nt, synthetic construct
  misc_feature 1..21: note = source = /note="Description of Artificial Sequence: Synthetic oligonucleotide"
  source 1..21: mol_type = other RNA
gcttcatgcccttctacattt

SEQ ID NO: 434 - RNA, 21 nt, synthetic construct
  misc_feature 1..21: note = source = /note="Description of Artificial Sequence: Synthetic oligonucleotide"
  source 1..21: mol_type = other RNA
atgtagaagggcatgaagctt

SEQ ID NO: 435 - RNA, 21 nt, synthetic construct
  misc_feature 1..21: note = source = /note="Description of Artificial Sequence: Synthetic oligonucleotide"
  source 1..21: mol_type = other RNA
gcttcatgcccttctacattt

SEQ ID NO: 436 - RNA, 21 nt, synthetic construct
  misc_feature 1..21: note = source = /note="Description of Artificial Sequence: Synthetic oligonucleotide"
  source 1..21: mol_type = other RNA
atgtagaagggcatgaagctt

SEQ ID NO: 437 - RNA, 21 nt, synthetic construct
  misc_feature 1..21: note = source = /note="Description of Artificial Sequence: Synthetic oligonucleotide"
  source 1..21: mol_type = other RNA
gcttcatgcccttctacattt

SEQ ID NO: 438 - RNA, 21 nt, synthetic construct
  misc_feature 1..21: note = source = /note="Description of Artificial Sequence: Synthetic oligonucleotide"
  source 1..21: mol_type = other RNA
atgtagaagggcatgaagctt

SEQ ID NO: 439 - RNA, 21 nt, synthetic construct
  misc_feature 1..21: note = source = /note="Description of Artificial Sequence: Synthetic oligonucleotide"
  source 1..21: mol_type = other RNA
gcttcatgcccttctacattt

SEQ ID NO: 440 - RNA, 21 nt, synthetic construct
  misc_feature 1..21: note = source = /note="Description of Artificial Sequence: Synthetic oligonucleotide"
  source 1..21: mol_type = other RNA
atgtagaagggcatgaagctt

SEQ ID NO: 441 - RNA, 21 nt, synthetic construct
  misc_feature 1..21: note = source = /note="Description of Artificial Sequence: Synthetic oligonucleotide"
  source 1..21: mol_type = other RNA
gcttcatgcccttctacagtt

SEQ ID NO: 442 - RNA, 23 nt, synthetic construct
  misc_feature 1..23: note = source = /note="Description of Artificial Sequence: Synthetic oligonucleotide"
  source 1..23: mol_type = other RNA
aactgtagaagggcatgaagctt

SEQ ID NO: 443 - RNA, 21 nt, synthetic construct
  misc_feature 1..21: note = source = /note="Description of Artificial Sequence: Synthetic oligonucleotide"
  source 1..21: mol_type = other RNA
ctgcttcatgcccttctacat

SEQ ID NO: 444 - RNA, 23 nt, synthetic construct
  misc_feature 1..23: note = source = /note="Description of Artificial Sequence: Synthetic oligonucleotide"
  source 1..23: mol_type = other RNA
atgtagaagggcatgaagcagtt

SEQ ID NO: 445 - RNA, 19 nt, synthetic construct
  misc_feature 1..19: note = source = /note="Description of Artificial Sequence: Synthetic oligonucleotide"
  source 1..19: mol_type = other RNA
gcttcatgcccttctacat

SEQ ID NO: 446 - RNA, 21 nt, synthetic construct
  misc_feature 1..21: note = source = /note="Description of Artificial Sequence: Synthetic oligonucleotide"
  source 1..21: mol_type = other RNA
atgtagaagggcatgaagctt

SEQ ID NO: 447 - RNA, 20 nt, synthetic construct
  modified_base 20: mod_base = OTHER; note = Inverted abasic nucleotide
  misc_feature 1..20: note = source = /note="Description of Artificial Sequence: Synthetic oligonucleotide"
  source 1..20: mol_type = other RNA
gcttcatgcccttctacatn

SEQ ID NO: 448 - RNA, 21 nt, synthetic construct
  misc_feature 1..21: note = source = /note="Description of Artificial Sequence: Synthetic oligonucleotide"
  source 1..21: mol_type = other RNA
atgtagaagggcatgaagctt

SEQ ID NO: 449 - RNA, 22 nt, synthetic construct
  modified_base 22: mod_base = OTHER; note = Inverted abasic nucleotide
  misc_feature 1..22: note = source = /note="Description of Artificial Sequence: Synthetic oligonucleotide"
  source 1..22: mol_type = other RNA
gcttcatgcccttctacatttn

SEQ ID NO: 450 - RNA, 21 nt, synthetic construct
  misc_feature 1..21: note = source = /note="Description of Artificial Sequence: Synthetic oligonucleotide"
  source 1..21: mol_type = other RNA
atgtagaagggcatgaagctt

SEQ ID NO: 451 - RNA, 21 nt, synthetic construct
  misc_feature 1..21: note = source = /note="Description of Artificial Sequence: Synthetic oligonucleotide"
  source 1..21: mol_type = other RNA
gcttcatgcccttctacattt

SEQ ID NO: 452 - RNA, 21 nt, synthetic construct
  misc_feature 1..21: note = source = /note="Description of Artificial Sequence: Synthetic oligonucleotide"
  source 1..21: mol_type = other RNA
atgtagaagggcatgaagctt

SEQ ID NO: 453 - RNA, 21 nt, synthetic construct
  misc_feature 1..21: note = source = /note="Description of Artificial Sequence: Synthetic oligonucleotide"
  source 1..21: mol_type = other RNA
gcttcatgcccttctacattt

SEQ ID NO: 454 - RNA, 21 nt, synthetic construct
  misc_feature 1..21: note = source = /note="Description of Artificial Sequence: Synthetic oligonucleotide"
  source 1..21: mol_type = other RNA
atgtagaagggcatgaagctt

SEQ ID NO: 455 - RNA, 21 nt, synthetic construct
  misc_feature 1..21: note = source = /note="Description of Artificial Sequence: Synthetic oligonucleotide"
  source 1..21: mol_type = other RNA
gcttcatgcccttctacattt

SEQ ID NO: 456 - RNA, 21 nt, synthetic construct
  misc_feature 1..21: note = source = /note="Description of Artificial Sequence: Synthetic oligonucleotide"
  source 1..21: mol_type = other RNA
atgtagaagggcatgaagctt

SEQ ID NO: 457 - RNA, 21 nt, synthetic construct
  misc_feature 1..21: note = source = /note="Description of Artificial Sequence: Synthetic oligonucleotide"
  source 1..21: mol_type = other RNA
gcttcatgcccttctacattt

SEQ ID NO: 458 - RNA, 21 nt, synthetic construct
  misc_feature 1..21: note = source = /note="Description of Artificial Sequence: Synthetic oligonucleotide"
  source 1..21: mol_type = other RNA
atgtagaagggcatgaagctt

SEQ ID NO: 459 - RNA, 21 nt, synthetic construct
  misc_feature 1..21: note = source = /note="Description of Artificial Sequence: Synthetic oligonucleotide"
  source 1..21: mol_type = other RNA
gcttcatgcccttctacattt

SEQ ID NO: 460 - RNA, 21 nt, synthetic construct
  misc_feature 1..21: note = source = /note="Description of Artificial Sequence: Synthetic oligonucleotide"
  source 1..21: mol_type = other RNA
atgtagaagggcatgaagctt

SEQ ID NO: 461 - RNA, 21 nt, synthetic construct
  misc_feature 1..21: note = source = /note="Description of Artificial Sequence: Synthetic oligonucleotide"
  source 1..21: mol_type = other RNA
gcttcatgcccttctacattt

SEQ ID NO: 462 - RNA, 21 nt, synthetic construct
  misc_feature 1..21: note = source = /note="Description of Artificial Sequence: Synthetic oligonucleotide"
  source 1..21: mol_type = other RNA
atgtagaagggcatgaagctt

SEQ ID NO: 463 - RNA, 21 nt, synthetic construct
  misc_feature 1..21: note = source = /note="Description of Artificial Sequence: Synthetic oligonucleotide"
  source 1..21: mol_type = other RNA
gcttcatgcccttctacattt

SEQ ID NO: 464 - RNA, 21 nt, synthetic construct
  misc_feature 1..21: note = source = /note="Description of Artificial Sequence: Synthetic oligonucleotide"
  source 1..21: mol_type = other RNA
atgtagaagggcatgaagctt

SEQ ID NO: 465 - RNA, 21 nt, synthetic construct
  misc_feature 1..21: note = source = /note="Description of Artificial Sequence: Synthetic oligonucleotide"
  source 1..21: mol_type = other RNA
gcttcatgcccttctacattt

SEQ ID NO: 466 - RNA, 21 nt, synthetic construct
  misc_feature 1..21: note = source = /note="Description of Artificial Sequence: Synthetic oligonucleotide"
  source 1..21: mol_type = other RNA
atgtagaagggcatgaagctt

SEQ ID NO: 467 - RNA, 21 nt, synthetic construct
  misc_feature 1..21: note = source = /note="Description of Artificial Sequence: Synthetic oligonucleotide"
  source 1..21: mol_type = other RNA
gcttcatgcccttctacattt

SEQ ID NO: 468 - RNA, 21 nt, synthetic construct
  misc_feature 1..21: note = source = /note="Description of Artificial Sequence: Synthetic oligonucleotide"
  source 1..21: mol_type = other RNA
atgtagaagggcatgaagctt

SEQ ID NO: 469 - RNA, 22 nt, synthetic construct
  modified_base 22: mod_base = OTHER; note = Inverted abasic nucleotide
  misc_feature 1..22: note = source = /note="Description of Artificial Sequence: Synthetic oligonucleotide"
  source 1..22: mol_type = other RNA
gtatgttcctgcttcatgcttn

SEQ ID NO: 470 - RNA, 21 nt, synthetic construct
  misc_feature 1..21: note = source = /note="Description of Artificial Sequence: Synthetic oligonucleotide"
  source 1..21: mol_type = other RNA
gcatgaagcaggaacatactt

SEQ ID NO: 471 - RNA, 21 nt, synthetic construct
  misc_feature 1..21: note = source = /note="Description of Artificial Sequence: Synthetic oligonucleotide"
  source 1..21: mol_type = other RNA
ggtatgttcctgcttcatttt

SEQ ID NO: 472 - RNA, 21 nt, synthetic construct
  misc_feature 1..21: note = source = /note="Description of Artificial Sequence: Synthetic oligonucleotide"
  source 1..21: mol_type = other RNA
aatgaagcaggaacatacctt

SEQ ID NO: 473 - RNA, 21 nt, synthetic construct
  misc_feature 1..21: note = source = /note="Description of Artificial Sequence: Synthetic oligonucleotide"
  source 1..21: mol_type = other RNA
gtatgttcctgcttcatgttt

SEQ ID NO: 474 - RNA, 21 nt, synthetic construct
  misc_feature 1..21: note = source = /note="Description of Artificial Sequence: Synthetic oligonucleotide"
  source 1..21: mol_type = other RNA
acatgaagcaggaacatactt

SEQ ID NO: 475 - RNA, 21 nt, synthetic construct
  misc_feature 1..21: note = source = /note="Description of Artificial Sequence: Synthetic oligonucleotide"
  source 1..21: mol_type = other RNA
cggccaatgtccaccagcttt

SEQ ID NO: 476 - RNA, 21 nt, synthetic construct
  misc_feature 1..21: note = source = /note="Description of Artificial Sequence: Synthetic oligonucleotide"
  source 1..21: mol_type = other RNA
agctggtggacattggccgtt

SEQ ID NO: 477 - RNA, 21 nt, synthetic construct
  misc_feature 1..21: note = source = /note="Description of Artificial Sequence: Synthetic oligonucleotide"
  source 1..21: mol_type = other RNA
tggagcagactctgcaggttt

SEQ ID NO: 478 - RNA, 21 nt, synthetic construct
  misc_feature 1..21: note = source = /note="Description of Artificial Sequence: Synthetic oligonucleotide"
  source 1..21: mol_type = other RNA
acctgcagagtctgctccatt

SEQ ID NO: 479 - RNA, 21 nt, synthetic construct
  misc_feature 1..21: note = source = /note="Description of Artificial Sequence: Synthetic oligonucleotide"
  source 1..21: mol_type = other RNA
acgtacccttcattgatgttt

SEQ ID NO: 480 - RNA, 21 nt, synthetic construct
  misc_feature 1..21: note = source = /note="Description of Artificial Sequence: Synthetic oligonucleotide"
  source 1..21: mol_type = other RNA
acatcaatgaagggtacgttt

SEQ ID NO: 481 - RNA, 21 nt, synthetic construct
  misc_feature 1..21: note = source = /note="Description of Artificial Sequence: Synthetic oligonucleotide"
  source 1..21: mol_type = other RNA
ccagagactggtgacatgttt

SEQ ID NO: 482 - RNA, 21 nt, synthetic construct
  misc_feature 1..21: note = source = /note="Description of Artificial Sequence: Synthetic oligonucleotide"
  source 1..21: mol_type = other RNA
acatgtcaccagtctctggtt

SEQ ID NO: 483 - RNA, 22 nt, synthetic construct
  modified_base 1: mod_base = OTHER; note = Inverted abasic nucleotide
  misc_feature 1..22: note = source = /note="Description of Artificial Sequence: Synthetic oligonucleotide"
  source 1..22: mol_type = other RNA
ngcttcatgcctttctacattt

SEQ ID NO: 484 - RNA, 21 nt, synthetic construct
  misc_feature 1..21: note = source = /note="Description of Artificial Sequence: Synthetic oligonucleotide"
  source 1..21: mol_type = other RNA
atgtagaaaggcatgaagctt

SEQ ID NO: 485 - RNA, 22 nt, synthetic construct
  modified_base 1: mod_base = OTHER; note = Inverted abasic nucleotide
  misc_feature 1..22: note = source = /note="Description of Artificial Sequence: Synthetic oligonucleotide"
  source 1..22: mol_type = other RNA
ngcttcatgcctttctacattt

SEQ ID NO: 486 - RNA, 23 nt, synthetic construct
  misc_feature 1..23: note = source = /note="Description of Artificial Sequence: Synthetic oligonucleotide"
  source 1..23: mol_type = other RNA
aaatgtagaaaggcatgaagctt

SEQ ID NO: 487 - RNA, 22 nt, synthetic construct
  modified_base 1: mod_base = OTHER; note = Inverted abasic nucleotide
  misc_feature 1..22: note = source = /note="Description of Artificial Sequence: Synthetic oligonucleotide"
  source 1..22: mol_type = other RNA
ngcttcatgcctttctacattt

SEQ ID NO: 488 - RNA, 23 nt, synthetic construct
  misc_feature 1..23: note = source = /note="Description of Artificial Sequence: Synthetic oligonucleotide"
  source 1..23: mol_type = other RNA
aaatgtagaaaggcatgaagctt

SEQ ID NO: 489 - RNA, 21 nt, synthetic construct
  misc_feature 1..21: note = source = /note="Description of Artificial Sequence: Synthetic oligonucleotide"
  source 1..21: mol_type = other RNA
tgcttcatgcctttctacatt

SEQ ID NO: 490 - RNA, 21 nt, synthetic construct
  misc_feature 1..21: note = source = /note="Description of Artificial Sequence: Synthetic oligonucleotide"
  source 1..21: mol_type = other RNA
tgtagaaaggcatgaagcatt

SEQ ID NO: 491 - RNA, 21 nt, synthetic construct
  misc_feature 1..21: note = source = /note="Description of Artificial Sequence: Synthetic oligonucleotide"
  source 1..21: mol_type = other RNA
tatgttcctgcttcatgcttt

SEQ ID NO: 492 - RNA, 21 nt, synthetic construct
  misc_feature 1..21: note = source = /note="Description of Artificial Sequence: Synthetic oligonucleotide"
  source 1..21: mol_type = other RNA
agcatgaagcaggaacatatt

SEQ ID NO: 493 - RNA, 21 nt, synthetic construct
  misc_feature 1..21: note = source = /note="Description of Artificial Sequence: Synthetic oligonucleotide"
  source 1..21: mol_type = other RNA
ttcctgcttcatgcctttttt

SEQ ID NO: 494 - RNA, 21 nt, synthetic construct
  misc_feature 1..21: note = source = /note="Description of Artificial Sequence: Synthetic oligonucleotide"
  source 1..21: mol_type = other RNA
aaaaggcatgaagcaggaatt

SEQ ID NO: 495 - RNA, 21 nt, synthetic construct
  misc_feature 1..21: note = source = /note="Description of Artificial Sequence: Synthetic oligonucleotide"
  source 1..21: mol_type = other RNA
tcatgcctttctacagtgttt

SEQ ID NO: 496 - RNA, 21 nt, synthetic construct
  misc_feature 1..21: note = source = /note="Description of Artificial Sequence: Synthetic oligonucleotide"
  source 1..21: mol_type = other RNA
acactgtagaaaggcatgatt

SEQ ID NO: 497 - RNA, 21 nt, synthetic construct
  misc_feature 1..21: note = source = /note="Description of Artificial Sequence: Synthetic oligonucleotide"
  source 1..21: mol_type = other RNA
catgcctttctacagtggttt

SEQ ID NO: 498 - RNA, 21 nt, synthetic construct
  misc_feature 1..21: note = source = /note="Description of Artificial Sequence: Synthetic oligonucleotide"
  source 1..21: mol_type = other RNA
accactgtagaaaggcatgtt

SEQ ID NO: 499 - RNA, 21 nt, synthetic construct
  misc_feature 1..21: note = source = /note="Description of Artificial Sequence: Synthetic oligonucleotide"
  source 1..21: mol_type = other RNA
atgcctttctacagtggcttt

SEQ ID NO: 500 - RNA, 21 nt, synthetic construct
  misc_feature 1..21: note = source = /note="Description of Artificial Sequence: Synthetic oligonucleotide"
  source 1..21: mol_type = other RNA
agccactgtagaaaggcattt

SEQ ID NO: 501 - RNA, 21 nt, synthetic construct
  misc_feature 1..21: note = source = /note="Description of Artificial Sequence: Synthetic oligonucleotide"
  source 1..21: mol_type = other RNA
ggtatgttcctgcttcatatt

SEQ ID NO: 502 - RNA, 21 nt, synthetic construct
  misc_feature 1..21: note = source = /note="Description of Artificial Sequence: Synthetic oligonucleotide"
  source 1..21: mol_type = other RNA
tatgaagcaggaacatacctt

SEQ ID NO: 503 - RNA, 21 nt, synthetic construct
  misc_feature 1..21: note = source = /note="Description of Artificial Sequence: Synthetic oligonucleotide"
  source 1..21: mol_type = other RNA
gtatgttcctgcttcatgatt

SEQ ID NO: 504 - RNA, 21 nt, synthetic construct
  misc_feature 1..21: note = source = /note="Description of Artificial Sequence: Synthetic oligonucleotide"
  source 1..21: mol_type = other RNA
tcatgaagcaggaacatactt

SEQ ID NO: 505 - RNA, 21 nt, synthetic construct
  misc_feature 1..21: note = source = /note="Description of Artificial Sequence: Synthetic oligonucleotide"
  source 1..21: mol_type = other RNA
tatgttcctgcttcatgcatt

SEQ ID NO: 506 - RNA, 21 nt, synthetic construct
  misc_feature 1..21: note = source = /note="Description of Artificial Sequence: Synthetic oligonucleotide"
  source 1..21: mol_type = other RNA
tgcatgaagcaggaacatatt

SEQ ID NO: 507 - RNA, 21 nt, synthetic construct
  misc_feature 1..21: note = source = /note="Description of Artificial Sequence: Synthetic oligonucleotide"
  source 1..21: mol_type = other RNA
ttcctgcttcatgcctttatt

SEQ ID NO: 508 - RNA, 21 nt, synthetic construct
  misc_feature 1..21: note = source = /note="Description of Artificial Sequence: Synthetic oligonucleotide"
  source 1..21: mol_type = other RNA
taaaggcatgaagcaggaatt

SEQ ID NO: 509 - RNA, 21 nt, synthetic construct
  misc_feature 1..21: note = source = /note="Description of Artificial Sequence: Synthetic oligonucleotide"
  source 1..21: mol_type = other RNA
ctgcttcatgcctttctaatt

SEQ ID NO: 510 - RNA, 21 nt, synthetic construct
  misc_feature 1..21: note = source = /note="Description of Artificial Sequence: Synthetic oligonucleotide"
  source 1..21: mol_type = other RNA
ttagaaaggcatgaagcagtt

SEQ ID NO: 511 - RNA, 21 nt, synthetic construct
  misc_feature 1..21: note = source = /note="Description of Artificial Sequence: Synthetic oligonucleotide"
  source 1..21: mol_type = other RNA
gcttcatgcctttctacaatt

SEQ ID NO: 512 - RNA, 21 nt, synthetic construct
  misc_feature 1..21: note = source = /note="Description of Artificial Sequence: Synthetic oligonucleotide"
  source 1..21: mol_type = other RNA
ttgtagaaaggcatgaagctt

SEQ ID NO: 513 - RNA, 21 nt, synthetic construct
  misc_feature 1..21: note = source = /note="Description of Artificial Sequence: Synthetic oligonucleotide"
  source 1..21: mol_type = other RNA
ttcatgcctttctacagtatt

SEQ ID NO: 514 - RNA, 21 nt, synthetic construct
  misc_feature 1..21: note = source = /note="Description of Artificial Sequence: Synthetic oligonucleotide"
  source 1..21: mol_type = other RNA
tactgtagaaaggcatgaatt

SEQ ID NO: 515 - RNA, 21 nt, synthetic construct
  misc_feature 1..21: note = source = /note="Description of Artificial Sequence: Synthetic oligonucleotide"
  source 1..21: mol_type = other RNA
tcatgcctttctacagtgatt

SEQ ID NO: 516 - RNA, 21 nt, synthetic construct
  misc_feature 1..21: note = source = /note="Description of Artificial Sequence: Synthetic oligonucleotide"
  source 1..21: mol_type = other RNA
tcactgtagaaaggcatgatt

SEQ ID NO: 517 - RNA, 21 nt, synthetic construct
  misc_feature 1..21: note = source = /note="Description of Artificial Sequence: Synthetic oligonucleotide"
  source 1..21: mol_type = other RNA
catgcctttctacagtggatt

SEQ ID NO: 518 - RNA, 21 nt, synthetic construct
  misc_feature 1..21: note = source = /note="Description of Artificial Sequence: Synthetic oligonucleotide"
  source 1..21: mol_type = other RNA
tccactgtagaaaggcatgtt

SEQ ID NO: 519 - RNA, 21 nt, synthetic construct
  misc_feature 1..21: note = source = /note="Description of Artificial Sequence: Synthetic oligonucleotide"
  source 1..21: mol_type = other RNA
atgcctttctacagtggcatt

SEQ ID NO: 520 - RNA, 21 nt, synthetic construct
  misc_feature 1..21: note = source = /note="Description of Artificial Sequence: Synthetic oligonucleotide"
  source 1..21: mol_type = other RNA
tgccactgtagaaaggcattt

SEQ ID NO: 521 - RNA, 21 nt, synthetic construct
  misc_feature 1..21: note = source = /note="Description of Artificial Sequence: Synthetic oligonucleotide"
  source 1..21: mol_type = other RNA
acgtacccttcattgatgatt

SEQ ID NO: 522 - RNA, 21 nt, synthetic construct
  misc_feature 1..21: note = source = /note="Description of Artificial Sequence: Synthetic oligonucleotide"
  source 1..21: mol_type = other RNA
tcatcaatgaagggtacgttt

SEQ ID NO: 523 - RNA, 21 nt, synthetic construct
  misc_feature 1..21: note = source = /note="Description of Artificial Sequence: Synthetic oligonucleotide"
  source 1..21: mol_type = other RNA
ccagagactggtgacatgatt

SEQ ID NO: 524 - RNA, 21 nt, synthetic construct
  misc_feature 1..21: note = source = /note="Description of Artificial Sequence: Synthetic oligonucleotide"
  source 1..21: mol_type = other RNA
tcatgtcaccagtctctggtt

SEQ ID NO: 525 - RNA, 21 nt, synthetic construct
  misc_feature 1..21: note = source = /note="Description of Artificial Sequence: Synthetic oligonucleotide"
  source 1..21: mol_type = other RNA
atggcttccagatatgccatt

SEQ ID NO: 526 - RNA, 21 nt, synthetic construct
  misc_feature 1..21: note = source = /note="Description of Artificial Sequence: Synthetic oligonucleotide"
  source 1..21: mol_type = other RNA
tggcatatctggaagccattt

SEQ ID NO: 527 - RNA, 21 nt, synthetic construct
  misc_feature 1..21: note = source = /note="Description of Artificial Sequence: Synthetic oligonucleotide"
  source 1..21: mol_type = other RNA
gttcctgcttcatgccttttt

SEQ ID NO: 528 - RNA, 21 nt, synthetic construct
  misc_feature 1..21: note = source = /note="Description of Artificial Sequence: Synthetic oligonucleotide"
  source 1..21: mol_type = other RNA
aaaggcatgaagcaggaactt

SEQ ID NO: 529 - RNA, 21 nt, synthetic construct
  misc_feature 1..21: note = source = /note="Description of Artificial Sequence: Synthetic oligonucleotide"
  source 1..21: mol_type = other RNA
cctgcttcatgcctttctatt

SEQ ID NO: 530 - RNA, 21 nt, synthetic construct
  misc_feature 1..21: note = source = /note="Description of Artificial Sequence: Synthetic oligonucleotide"
  source 1..21: mol_type = other RNA
tagaaaggcatgaagcaggtt

SEQ ID NO: 531 - RNA, 21 nt, synthetic construct
  misc_feature 1..21: note = source = /note="Description of Artificial Sequence: Synthetic oligonucleotide"
  source 1..21: mol_type = other RNA
gcttcatgcctttctacattt

SEQ ID NO: 532 - RNA, 21 nt, synthetic construct
  misc_feature 1..21: note = source = /note="Description of Artificial Sequence: Synthetic oligonucleotide"
  source 1..21: mol_type = other RNA
atgtagaaaggcatgaagctt

SEQ ID NO: 533 - RNA, 21 nt, synthetic construct
  misc_feature 1..21: note = source = /note="Description of Artificial Sequence: Synthetic oligonucleotide"
  source 1..21: mol_type = other RNA
cttcatgcctttctacagttt

SEQ ID NO: 534 - RNA, 21 nt, synthetic construct
  misc_feature 1..21: note = source = /note="Description of Artificial Sequence: Synthetic oligonucleotide"
  source 1..21: mol_type = other RNA
actgtagaaaggcatgaagtt

SEQ ID NO: 535 - RNA, 21 nt, synthetic construct
  misc_feature 1..21: note = source = /note="Description of Artificial Sequence: Synthetic oligonucleotide"
  source 1..21: mol_type = other RNA
ttcatgcctttctacagtttt

SEQ ID NO: 536 - RNA, 21 nt, synthetic construct
  misc_feature 1..21: note = source = /note="Description of Artificial Sequence: Synthetic oligonucleotide"
  source 1..21: mol_type = other RNA
aactgtagaaaggcatgaatt

SEQ ID NO: 537 - RNA, 21 nt, synthetic construct
  misc_feature 1..21: note = source = /note="Description of Artificial Sequence: Synthetic oligonucleotide"
  source 1..21: mol_type = other RNA
gcttcatccctttctacattt

SEQ ID NO: 538 - RNA, 21 nt, synthetic construct
  misc_feature 1..21: note = source = /note="Description of Artificial Sequence: Synthetic oligonucleotide"
  source 1..21: mol_type = other RNA
atgtagaaagggatgaagctt

SEQ ID NO: 539 - RNA, 22 nt, synthetic construct
  modified_base 1: mod_base = OTHER; note = Inverted abasic nucleotide
  misc_feature 1..22: note = source = /note="Description of Artificial Sequence: Synthetic oligonucleotide"
  source 1..22: mol_type = other RNA
ngcttcatgcccttctacattt

SEQ ID NO: 540 - RNA, 21 nt, synthetic construct
  misc_feature 1..21: note = source = /note="Description of Artificial Sequence: Synthetic oligonucleotide"
  source 1..21: mol_type = other RNA
atgtagaagggcatgaagctt

SEQ ID NO: 541 - RNA, 22 nt, synthetic construct
  modified_base 1: mod_base = OTHER; note = Inverted abasic nucleotide
  misc_feature 1..22: note = source = /note="Description of Artificial Sequence: Synthetic oligonucleotide"
  source 1..22: mol_type = other RNA
ngcttcatgcccttctacattt

SEQ ID NO: 542 - RNA, 23 nt, synthetic construct
  misc_feature 1..23: note = source = /note="Description of Artificial Sequence: Synthetic oligonucleotide"
  source 1..23: mol_type = other RNA
aaatgtagaagggcatgaagctt

SEQ ID NO: 543 - RNA, 22 nt, synthetic construct
  modified_base 1: mod_base = OTHER; note = Inverted abasic nucleotide
  misc_feature 1..22: note = source = /note="Description of Artificial Sequence: Synthetic oligonucleotide"
  source 1..22: mol_type = other RNA
ngcttcatgcccttctacattt

SEQ ID NO: 544 - RNA, 23 nt, synthetic construct
  misc_feature 1..23: note = source = /note="Description of Artificial Sequence: Synthetic oligonucleotide"
  source 1..23: mol_type = other RNA
aaatgtagaagggcatgaagctt

SEQ ID NO: 545 - RNA, 22 nt, synthetic construct
  modified_base 1: mod_base = OTHER; note = Inverted abasic nucleotide
  misc_feature 1..22: note = source = /note="Description of Artificial Sequence: Synthetic oligonucleotide"
  source 1..22: mol_type = other RNA
ngcggcttcctgggcttctatt

SEQ ID NO: 546 - RNA, 21 nt, synthetic construct
  misc_feature 1..21: note = source = /note="Description of Artificial Sequence: Synthetic oligonucleotide"
  source 1..21: mol_type = other RNA
tagaagcccaggaagccgctt

SEQ ID NO: 547 - RNA, 22 nt, synthetic construct
  modified_base 1: mod_base = OTHER; note = Inverted abasic nucleotide
  misc_feature 1..22: note = source = /note="Description of Artificial Sequence: Synthetic oligonucleotide"
  source 1..22: mol_type = other RNA
nctgcggcttcctgggcttcta

SEQ ID NO: 548 - RNA, 23 nt, synthetic construct
  misc_feature 1..23: note = source = /note="Description of Artificial Sequence: Synthetic oligonucleotide"
  source 1..23: mol_type = other RNA
tagaagcccaggaagccgcagtt

SEQ ID NO: 549 - RNA, 21 nt, synthetic construct
  modified_base 21: mod_base = OTHER; note = Inverted abasic nucleotide
  misc_feature 1..21: note = source = /note="Description of Artificial Sequence: Synthetic oligonucleotide"
  source 1..21: mol_type = other RNA
ctgcggcttcctgggcttctn

SEQ ID NO: 550 - RNA, 23 nt, synthetic construct
  misc_feature 1..23: note = source = /note="Description of Artificial Sequence: Synthetic oligonucleotide"
  source 1..23: mol_type = other RNA
tagaagcccaggaagccgcagtt

SEQ ID NO: 551 - RNA, 22 nt, synthetic construct
  modified_base 1: mod_base = OTHER; note = Inverted abasic nucleotide
  misc_feature 1..22: note = source = /note="Description of Artificial Sequence: Synthetic oligonucleotide"
  source 1..22: mol_type = other RNA
nctgcggcttcctgggcttcta

SEQ ID NO: 552 - RNA, 23 nt, synthetic construct
  misc_feature 1..23: note = source = /note="Description of Artificial Sequence: Synthetic oligonucleotide"
  source 1..23: mol_type = other RNA
tagaagcccaggaagccgcagtt

SEQ ID NO: 553 - RNA, 22 nt, synthetic construct
  modified_base 1: mod_base = OTHER; note = Inverted abasic nucleotide
  misc_feature 1..22: note = source = /note="Description of Artificial Sequence: Synthetic oligonucleotide"
  source 1..22: mol_type = other RNA
ngcggcttcctgggcttctatt

SEQ ID NO: 554 - RNA, 21 nt, synthetic construct
  misc_feature 1..21: note = source = /note="Description of Artificial Sequence: Synthetic oligonucleotide"
  source 1..21: mol_type = other RNA
tagaagcccaggaagccgctt

SEQ ID NO: 555 - RNA, 21 nt, synthetic construct
  modified_base 21: mod_base = OTHER; note = Inverted abasic nucleotide
  misc_feature 1..21: note = source = /note="Description of Artificial Sequence: Synthetic oligonucleotide"
  source 1..21: mol_type = other RNA
ctgcggcttcctgggcttctn

SEQ ID NO: 556 - RNA, 23 nt, synthetic construct
  misc_feature 1..23: note = source = /note="Description of Artificial Sequence: Synthetic oligonucleotide"
  source 1..23: mol_type = other RNA
tagaagcccaggaagccgcagtt

SEQ ID NO: 557 - RNA, 22 nt, synthetic construct
  modified_base 1: mod_base = OTHER; note = Inverted abasic nucleotide
  misc_feature 1..22: note = source = /note="Description of Artificial Sequence: Synthetic oligonucleotide"
  source 1..22: mol_type = other RNA
nctgcggcttcctgggcttcta

SEQ ID NO: 558 - RNA, 23 nt, synthetic construct
  misc_feature 1..23: note = source = /note="Description of Artificial Sequence: Synthetic oligonucleotide"
  source 1..23: mol_type = other RNA
tagaagcccaggaagccgcagtt

SEQ ID NO: 559 - RNA, 22 nt, synthetic construct
  modified_base 1: mod_base = OTHER; note = Inverted abasic nucleotide
  misc_feature 1..22: note = source = /note="Description of Artificial Sequence: Synthetic oligonucleotide"
  source 1..22: mol_type = other RNA
ngcggcttcctgggcttctatt

SEQ ID NO: 560 - RNA, 21 nt, synthetic construct
  misc_feature 1..21: note = source = /note="Description of Artificial Sequence: Synthetic oligonucleotide"
  source 1..21: mol_type = other RNA
tagaagcccaggaagccgctt

SEQ ID NO: 561 - RNA, 21 nt, synthetic construct
  modified_base 21: mod_base = OTHER; note = Inverted abasic nucleotide
  misc_feature 1..21: note = source = /note="Description of Artificial Sequence: Synthetic oligonucleotide"
  source 1..21: mol_type = other RNA
ctgcggcttcctgggcttctn

SEQ ID NO: 562 - RNA, 23 nt, synthetic construct
  misc_feature 1..23: note = source = /note="Description of Artificial Sequence: Synthetic oligonucleotide"
  source 1..23: mol_type = other RNA
tagaagcccaggaagccgcagtt

SEQ ID NO: 563 - RNA, 22 nt, synthetic construct
  modified_base 1: mod_base = OTHER; note = Inverted abasic nucleotide
  misc_feature 1..22: note = source = /note="Description of Artificial Sequence: Synthetic oligonucleotide"
  source 1..22: mol_type = other RNA
nctgcggcttcctgggcttcta

SEQ ID NO: 564 - RNA, 23 nt, synthetic construct
  misc_feature 1..23: note = source = /note="Description of Artificial Sequence: Synthetic oligonucleotide"
  source 1..23: mol_type = other RNA
tagaagcccaggaagccgcagtt

SEQ ID NO: 565 - RNA, 22 nt, synthetic construct
  modified_base 1: mod_base = OTHER; note = Inverted abasic nucleotide
  misc_feature 1..22: note = source = /note="Description of Artificial Sequence: Synthetic oligonucleotide"
  source 1..22: mol_type = other RNA
ngcggcttcctgggcttctatt

SEQ ID NO: 566 - RNA, 21 nt, synthetic construct
  misc_feature 1..21: note = source = /note="Description of Artificial Sequence: Synthetic oligonucleotide"
  source 1..21: mol_type = other RNA
tagaagcccaggaagccgctt

SEQ ID NO: 567 - RNA, 22 nt, synthetic construct
  modified_base 1: mod_base = OTHER; note = Inverted abasic nucleotide
  misc_feature 1..22: note = source = /note="Description of Artificial Sequence: Synthetic oligonucleotide"
  source 1..22: mol_type = other RNA
nctgcggcttcctgggcttcta

SEQ ID NO: 568 - RNA, 23 nt, synthetic construct
  misc_feature 1..23: note = source = /note="Description of Artificial Sequence: Synthetic oligonucleotide"
  source 1..23: mol_type = other RNA
tagaagcccaggaagccgcagtt

SEQ ID NO: 569 - RNA, 22 nt, synthetic construct
  modified_base 1: mod_base = OTHER; note = Inverted abasic nucleotide
  misc_feature 1..22: note = source = /note="Description of Artificial Sequence: Synthetic oligonucleotide"
  source 1..22: mol_type = other RNA
nctgcggcttcctgggcttcta

SEQ ID NO: 570 - RNA, 23 nt, synthetic construct
  misc_feature 1..23: note = source = /note="Description of Artificial Sequence: Synthetic oligonucleotide"
  source 1..23: mol_type = other RNA
tagaagcccaggaagccgcagtt

SEQ ID NO: 571 - RNA, 22 nt, synthetic construct
  modified_base 1: mod_base = OTHER; note = Inverted abasic nucleotide
  misc_feature 1..22: note = source = /note="Description of Artificial Sequence: Synthetic oligonucleotide"
  source 1..22: mol_type = other RNA
nctgcggcttcctgggcttcta

SEQ ID NO: 572 - RNA, 23 nt, synthetic construct
  misc_feature 1..23: note = source = /note="Description of Artificial Sequence: Synthetic oligonucleotide"
  source 1..23: mol_type = other RNA
tagaagcccaggaagccgcagtt

SEQ ID NO: 573 - RNA, 22 nt, synthetic construct
  modified_base 1: mod_base = OTHER; note = Inverted abasic nucleotide
  misc_feature 1..22: note = source = /note="Description of Artificial Sequence: Synthetic oligonucleotide"
  source 1..22: mol_type = other RNA
natggcttccagatatgccttt

SEQ ID NO: 574 - RNA, 21 nt, synthetic construct
  misc_feature 1..21: note = source = /note="Description of Artificial Sequence: Synthetic oligonucleotide"
  source 1..21: mol_type = other RNA
aggcatatctggaagccattt

SEQ ID NO: 575 - RNA, 22 nt, synthetic construct
  modified_base 1: mod_base = OTHER; note = Inverted abasic nucleotide
  misc_feature 1..22: note = source = /note="Description of Artificial Sequence: Synthetic oligonucleotide"
  source 1..22: mol_type = other RNA
nacatggcttccagatatgcct

SEQ ID NO: 576 - RNA, 23 nt, synthetic construct
  misc_feature 1..23: note = source = /note="Description of Artificial Sequence: Synthetic oligonucleotide"
  source 1..23: mol_type = other RNA
aggcatatctggaagccatgttt

SEQ ID NO: 577 - RNA, 21 nt, synthetic construct
  modified_base 21: mod_base = OTHER; note = Inverted abasic nucleotide
  misc_feature 1..21: note = source = /note="Description of Artificial Sequence: Synthetic oligonucleotide"
  source 1..21: mol_type = other RNA
acatggcttccagatatgccn

SEQ ID NO: 578 - RNA, 23 nt, synthetic construct
  misc_feature 1..23: note = source = /note="Description of Artificial Sequence: Synthetic oligonucleotide"
  source 1..23: mol_type = other RNA
aggcatatctggaagccatgttt

SEQ ID NO: 579 - RNA, 22 nt, synthetic construct
  modified_base 1: mod_base = OTHER; note = Inverted abasic nucleotide
  misc_feature 1..22: note = source = /note="Description of Artificial Sequence: Synthetic oligonucleotide"
  source 1..22: mol_type = other RNA
nacatggcttccagatatgcct

SEQ ID NO: 580 - RNA, 23 nt, synthetic construct
  misc_feature 1..23: note = source = /note="Description of Artificial Sequence: Synthetic oligonucleotide"
  source 1..23: mol_type = other RNA
aggcatatctggaagccatgttt

SEQ ID NO: 581 - RNA, 22 nt, synthetic construct
  modified_base 1: mod_base = OTHER; note = Inverted abasic nucleotide
  misc_feature 1..22: note = source = /note="Description of Artificial Sequence: Synthetic oligonucleotide"
  source 1..22: mol_type = other RNA
natggcttccagatatgccttt

SEQ ID NO: 582 - RNA, 21 nt, synthetic construct
  misc_feature 1..21: note = source = /note="Description of Artificial Sequence: Synthetic oligonucleotide"
  source 1..21: mol_type = other RNA
aggcatatctggaagccattt

SEQ ID NO: 583 - RNA, 21 nt, synthetic construct
  modified_base 21: mod_base = OTHER; note = Inverted abasic nucleotide
  misc_feature 1..21: note = source = /note="Description of Artificial Sequence: Synthetic oligonucleotide"
  source 1..21: mol_type = other RNA
acatggcttccagatatgccn

SEQ ID NO: 584 - RNA, 23 nt, synthetic construct
  misc_feature 1..23: note = source = /note="Description of Artificial Sequence: Synthetic oligonucleotide"
  source 1..23: mol_type = other RNA
aggcatatctggaagccatgttt

SEQ ID NO: 585 - RNA, 22 nt, synthetic construct
  modified_base 1: mod_base = OTHER; note = Inverted abasic nucleotide
  misc_feature 1..22: note = source = /note="Description of Artificial Sequence: Synthetic oligonucleotide"
  source 1..22: mol_type = other RNA
nacatggcttccagatatgcct

SEQ ID NO: 586 - RNA, 23 nt, synthetic construct
  misc_feature 1..23: note = source = /note="Description of Artificial Sequence: Synthetic oligonucleotide"
  source 1..23: mol_type = other RNA
aggcatatctggaagccatgttt

SEQ ID NO: 587 - RNA, 22 nt, synthetic construct
  modified_base 1: mod_base = OTHER; note = Inverted abasic nucleotide
  misc_feature 1..22: note = source = /note="Description of Artificial Sequence: Synthetic oligonucleotide"
  source 1..22: mol_type = other RNA
natggcttccagatatgccttt

SEQ ID NO: 588 - RNA, 21 nt, synthetic construct
  misc_feature 1..21: note = source = /note="Description of Artificial Sequence: Synthetic oligonucleotide"
  source 1..21: mol_type = other RNA
aggcatatctggaagccattt

SEQ ID NO: 589 - RNA, 21 nt, synthetic construct
  modified_base 21: mod_base = OTHER; note = Inverted abasic nucleotide
  misc_feature 1..21: note = source = /note="Description of Artificial Sequence: Synthetic oligonucleotide"
  source 1..21: mol_type = other RNA
acatggcttccagatatgccn

SEQ ID NO: 590 - RNA, 23 nt, synthetic construct
  misc_feature 1..23: note = source = /note="Description of Artificial Sequence: Synthetic oligonucleotide"
  source 1..23: mol_type = other RNA
aggcatatctggaagccatgttt

SEQ ID NO: 591 - RNA, 22 nt, synthetic construct
  modified_base 1: mod_base = OTHER; note = Inverted abasic nucleotide
  misc_feature 1..22: note = source = /note="Description of Artificial Sequence: Synthetic oligonucleotide"
  source 1..22: mol_type = other RNA
nacatggcttccagatatgcct

SEQ ID NO: 592 - RNA, 23 nt, synthetic construct
  misc_feature 1..23: note = source = /note="Description of Artificial Sequence: Synthetic oligonucleotide"
  source 1..23: mol_type = other RNA
aggcatatctggaagccatgttt

SEQ ID NO: 593 - RNA, 22 nt, synthetic construct
  modified_base 1: mod_base = OTHER; note = Inverted abasic nucleotide
  misc_feature 1..22: note = source = /note="Description of Artificial Sequence: Synthetic oligonucleotide"
  source 1..22: mol_type = other RNA
natggcttccagatatgccttt

SEQ ID NO: 594 - RNA, 21 nt, synthetic construct
  misc_feature 1..21: note = source = /note="Description of Artificial Sequence: Synthetic oligonucleotide"
  source 1..21: mol_type = other RNA
aggcatatctggaagccattt

SEQ ID NO: 595 - RNA, 21 nt, synthetic construct
  modified_base 21: mod_base = OTHER; note = Inverted abasic nucleotide
  misc_feature 1..21: note = source = /note="Description of Artificial Sequence: Synthetic oligonucleotide"
  source 1..21: mol_type = other RNA
acatggcttccagatatgccn

SEQ ID NO: 596 - RNA, 23 nt, synthetic construct
  misc_feature 1..23: note = source = /note="Description of Artificial Sequence: Synthetic oligonucleotide"
  source 1..23: mol_type = other RNA
aggcatatctggaagccatgttt

SEQ ID NO: 597 - RNA, 22 nt, synthetic construct
  modified_base 1: mod_base = OTHER; note = Inverted abasic nucleotide
  misc_feature 1..22: note = source = /note="Description of Artificial Sequence: Synthetic oligonucleotide"
  source 1..22: mol_type = other RNA
nacatggcttccagatatgcct

SEQ ID NO: 598 - RNA, 23 nt, synthetic construct
  misc_feature 1..23: note = source = /note="Description of Artificial Sequence: Synthetic oligonucleotide"
  source 1..23: mol_type = other RNA
aggcatatctggaagccatgttt

SEQ ID NO: 599 - RNA, 22 nt, synthetic construct
  modified_base 1: mod_base = OTHER; note = Inverted abasic nucleotide
  misc_feature 1..22: note = source = /note="Description of Artificial Sequence: Synthetic oligonucleotide"
  source 1..22: mol_type = other RNA
nacatggcttccagatatgcct

SEQ ID NO: 600 - RNA, 23 nt, synthetic construct
  misc_feature 1..23: note = source = /note="Description of Artificial Sequence: Synthetic oligonucleotide"
  source 1..23: mol_type = other RNA
aggcatatctggaagccatgttt

SEQ ID NO: 601 - RNA, 22 nt, synthetic construct
  modified_base 1: mod_base = OTHER; note = Inverted abasic nucleotide
  misc_feature 1..22: note = source = /note="Description of Artificial Sequence: Synthetic oligonucleotide"
  source 1..22: mol_type = other RNA
nacatggcttccagatatgcct

SEQ ID NO: 602 - RNA, 23 nt, synthetic construct
  misc_feature 1..23: note = source = /note="Description of Artificial Sequence: Synthetic oligonucleotide"
  source 1..23: mol_type = other RNA
aggcatatctggaagccatgttt

SEQ ID NO: 603 - RNA, 22 nt, synthetic construct
  modified_base 1: mod_base = OTHER; note = Inverted abasic nucleotide
  misc_feature 1..22: note = source = /note="Description of Artificial Sequence: Synthetic oligonucleotide"
  source 1..22: mol_type = other RNA
nacatggcttccagatatgcct

SEQ ID NO: 604 - RNA, 23 nt, synthetic construct
  misc_feature 1..23: note = source = /note="Description of Artificial Sequence: Synthetic oligonucleotide"
  source 1..23: mol_type = other RNA
aggcatatctggaagccatgttt

SEQ ID NO: 605 - RNA, 22 nt, synthetic construct
  modified_base 1: mod_base = OTHER; note = Inverted abasic nucleotide
  misc_feature 1..22: note = source = /note="Description of Artificial Sequence: Synthetic oligonucleotide"
  source 1..22: mol_type = other RNA
nacgtacccttcattgatgttt

SEQ ID NO: 606 - RNA, 21 nt, synthetic construct
  misc_feature 1..21: note = source = /note="Description of Artificial Sequence: Synthetic oligonucleotide"
  source 1..21: mol_type = other RNA
acatcaatgaagggtacgttt

SEQ ID NO: 607 - RNA, 22 nt, synthetic construct
  modified_base 1: mod_base = OTHER; note = Inverted abasic nucleotide
  misc_feature 1..22: note = source = /note="Description of Artificial Sequence: Synthetic oligonucleotide"
  source 1..22: mol_type = other RNA
ncaacgtacccttcattgatgt

SEQ ID NO: 608 - RNA, 23 nt, synthetic construct
  misc_feature 1..23: note = source = /note="Description of Artificial Sequence: Synthetic oligonucleotide"
  source 1..23: mol_type = other RNA
acatcaatgaagggtacgttgtt

SEQ ID NO: 609 - RNA, 22 nt, synthetic construct
  modified_base 1: mod_base = OTHER; note = Inverted abasic nucleotide
  misc_feature 1..22: note = source = /note="Description of Artificial Sequence: Synthetic oligonucleotide"
  source 1..22: mol_type = other RNA
ncaacgtacccttcattgatgt

SEQ ID NO: 610 - RNA, 23 nt, synthetic construct
  misc_feature 1..23: note = source = /note="Description of Artificial Sequence: Synthetic oligonucleotide"
  source 1..23: mol_type = other RNA
acatcaatgaagggtacgttgtt

SEQ ID NO: 611 - RNA, 22 nt, synthetic construct
  modified_base 1: mod_base = OTHER; note = Inverted abasic nucleotide
  misc_feature 1..22: note = source = /note="Description of Artificial Sequence: Synthetic oligonucleotide"
  source 1..22: mol_type = other RNA
nacgtacccttcattgatgttt

SEQ ID NO: 612 - RNA, 21 nt, synthetic construct
  misc_feature 1..21: note = source = /note="Description of Artificial Sequence: Synthetic oligonucleotide"
  source 1..21: mol_type = other RNA
acatcaatgaagggtacgttt

SEQ ID NO: 613 - RNA, 21 nt, synthetic construct
  modified_base 21: mod_base = OTHER; note = Inverted abasic nucleotide
  misc_feature 1..21: note = source = /note="Description of Artificial Sequence: Synthetic oligonucleotide"
  source 1..21: mol_type = other RNA
caacgtacccttcattgatgn

SEQ ID NO: 614 - RNA, 23 nt, synthetic construct
  misc_feature 1..23: note = source = /note="Description of Artificial Sequence: Synthetic oligonucleotide"
  source 1..23: mol_type = other RNA
acatcaatgaagggtacgttgtt

SEQ ID NO: 615 - RNA, 22 nt, synthetic construct
  modified_base 1: mod_base = OTHER; note = Inverted abasic nucleotide
  misc_feature 1..22: note = source = /note="Description of Artificial Sequence: Synthetic oligonucleotide"
  source 1..22: mol_type = other RNA
nacgtacccttcattgatgttt

SEQ ID NO: 616 - RNA, 21 nt, synthetic construct
  misc_feature 1..21: note = source = /note="Description of Artificial Sequence: Synthetic oligonucleotide"
  source 1..21: mol_type = other RNA
acatcaatgaagggtacgttt

SEQ ID NO: 617 - RNA, 21 nt, synthetic construct
  modified_base 21: mod_base = OTHER; note = Inverted abasic nucleotide
  misc_feature 1..21: note = source = /note="Description of Artificial Sequence: Synthetic oligonucleotide"
  source 1..21: mol_type = other RNA
caacgtacccttcattgatgn

SEQ ID NO: 618 - RNA, 23 nt, synthetic construct
  misc_feature 1..23: note = source = /note="Description of Artificial Sequence: Synthetic oligonucleotide"
  source 1..23: mol_type = other RNA
acatcaatgaagggtacgttgtt

SEQ ID NO: 619 - RNA, 22 nt, synthetic construct
  modified_base 1: mod_base = OTHER; note = Inverted abasic nucleotide
  misc_feature 1..22: note = source = /note="Description of Artificial Sequence: Synthetic oligonucleotide"
  source 1..22: mol_type = other RNA
ncaacgtacccttcattgatgt

SEQ ID NO: 620 - RNA, 23 nt, synthetic construct
  misc_feature 1..23: note = source = /note="Description of Artificial Sequence: Synthetic oligonucleotide"
  source 1..23: mol_type = other RNA
acatcaatgaagggtacgttgtt

SEQ ID NO: 621 - RNA, 22 nt, synthetic construct
  modified_base 1: mod_base = OTHER; note = Inverted abasic nucleotide
  misc_feature 1..22: note = source = /note="Description of Artificial Sequence: Synthetic oligonucleotide"
  source 1..22: mol_type = other RNA
nacgtacccttcattgatgttt

SEQ ID NO: 622 - RNA, 21 nt, synthetic construct
  misc_feature 1..21: note = source = /note="Description of Artificial Sequence: Synthetic oligonucleotide"
  source 1..21: mol_type = other RNA
acatcaatgaagggtacgttt

SEQ ID NO: 623 - RNA, 21 nt, synthetic construct
  modified_base 21: mod_base = OTHER; note = Inverted abasic nucleotide
  misc_feature 1..21: note = source = /note="Description of Artificial Sequence: Synthetic oligonucleotide"
  source 1..21: mol_type = other RNA
caacgtacccttcattgatgn

SEQ ID NO: 624 - RNA, 23 nt, synthetic construct
  misc_feature 1..23: note = source = /note="Description of Artificial Sequence: Synthetic oligonucleotide"
  source 1..23: mol_type = other RNA
acatcaatgaagggtacgttgtt

SEQ ID NO: 625 - RNA, 22 nt, synthetic construct
  modified_base 1: mod_base = OTHER; note = Inverted abasic nucleotide
  misc_feature 1..22: note = source = /note="Description of Artificial Sequence: Synthetic oligonucleotide"
  source 1..22: mol_type = other RNA
ncaacgtacccttcattgatgt

SEQ ID NO: 626 - RNA, 23 nt, synthetic construct
  misc_feature 1..23: note = source = /note="Description of Artificial Sequence: Synthetic oligonucleotide"
  source 1..23: mol_type = other RNA
acatcaatgaagggtacgttgtt

SEQ ID NO: 627 - RNA, 22 nt, synthetic construct
  modified_base 1: mod_base = OTHER; note = Inverted abasic nucleotide
  misc_feature 1..22: note = source = /note="Description of Artificial Sequence: Synthetic oligonucleotide"
  source 1..22: mol_type = other RNA
ncaacgtacccttcattgatgt

SEQ ID NO: 628 - RNA, 23 nt, synthetic construct
  misc_feature 1..23: note = source = /note="Description of Artificial Sequence: Synthetic oligonucleotide"
  source 1..23: mol_type = other RNA
acatcaatgaagggtacgttgtt

SEQ ID NO: 629 - RNA, 22 nt, synthetic construct
  modified_base 1: mod_base = OTHER; note = Inverted abasic nucleotide
  misc_feature 1..22: note = source = /note="Description of Artificial Sequence: Synthetic oligonucleotide"
  source 1..22: mol_type = other RNA
ncaacgtacccttcattgatgt

SEQ ID NO: 630 - RNA, 23 nt, synthetic construct
  misc_feature 1..23: note = source = /note="Description of Artificial Sequence: Synthetic oligonucleotide"
  source 1..23: mol_type = other RNA
acatcaatgaagggtacgttgtt

SEQ ID NO: 631 - RNA, 22 nt, synthetic construct
  modified_base 1: mod_base = OTHER; note = Inverted abasic nucleotide
  misc_feature 1..22: note = source = /note="Description of Artificial Sequence: Synthetic oligonucleotide"
  source 1..22: mol_type = other RNA
ncaacgtacccttcattgatgt

SEQ ID NO: 632 - RNA, 23 nt, synthetic construct
  misc_feature 1..23: note = source = /note="Description of Artificial Sequence: Synthetic oligonucleotide"
  source 1..23: mol_type = other RNA
acatcaatgaagggtacgttgtt

SEQ ID NO: 633 - RNA, 21 nt, synthetic construct
  misc_feature 1..21: note = source = /note="Description of Artificial Sequence: Synthetic oligonucleotide"
  source 1..21: mol_type = other RNA
ctgcttcatgcctttctacat

SEQ ID NO: 634 - RNA, 23 nt, synthetic construct
  misc_feature 1..23: note = source = /note="Description of Artificial Sequence: Synthetic oligonucleotide"
  source 1..23: mol_type = other RNA
atgtagaaaggcatgaagcagtt

SEQ ID NO: 635 - RNA, 21 nt, synthetic construct
  misc_feature 1..21: note = source = /note="Description of Artificial Sequence: Synthetic oligonucleotide"
  source 1..21: mol_type = other RNA
ctgcttcatgcctttctacat

SEQ ID NO: 636 - RNA, 23 nt, synthetic construct
  misc_feature 1..23: note = source = /note="Description of Artificial Sequence: Synthetic oligonucleotide"
  source 1..23: mol_type = other RNA
atgtagaaaggcatgaagcagtt

SEQ ID NO: 637 - RNA, 22 nt, synthetic construct
  modified_base 1: mod_base = OTHER; note = Inverted abasic nucleotide
  misc_feature 1..22: note = source = /note="Description of Artificial Sequence: Synthetic oligonucleotide"
  source 1..22: mol_type = other RNA
ngcttcatgcctttctacattt

SEQ ID NO: 638 - RNA, 21 nt, synthetic construct
  misc_feature 1..21: note = source = /note="Description of Artificial Sequence: Synthetic oligonucleotide"
  source 1..21: mol_type = other RNA
atgtagaaaggcatgaagctt

SEQ ID NO: 639 - RNA, 22 nt, synthetic construct
  modified_base 1: mod_base = OTHER; note = Inverted abasic nucleotide
  misc_feature 1..22: note = source = /note="Description of Artificial Sequence: Synthetic oligonucleotide"
  source 1..22: mol_type = other RNA
ngcttcatgcctttctacattt

SEQ ID NO: 640 - RNA, 21 nt, synthetic construct
  misc_feature 1..21: note = source = /note="Description of Artificial Sequence: Synthetic oligonucleotide"
  source 1..21: mol_type = other RNA
atgtagaaaggcatgaagctt

SEQ ID NO: 641 - RNA, 21 nt, synthetic construct
  misc_feature 1..21: note = source = /note="Description of Artificial Sequence: Synthetic oligonucleotide"
  source 1..21: mol_type = other RNA
ctgcttcatgcctttctacat

SEQ ID NO: 642 - RNA, 23 nt, synthetic construct
  misc_feature 1..23: note = source = /note="Description of Artificial Sequence: Synthetic oligonucleotide"
  source 1..23: mol_type = other RNA
atgtagaaaggcatgaagcagtt

SEQ ID NO: 643 - RNA, 21 nt, synthetic construct
  misc_feature 1..21: note = source = /note="Description of Artificial Sequence: Synthetic oligonucleotide"
  source 1..21: mol_type = other RNA
ctgcttcatgcctttctacat

SEQ ID NO: 644 - RNA, 23 nt, synthetic construct
  misc_feature 1..23: note = source = /note="Description of Artificial Sequence: Synthetic oligonucleotide"
  source 1..23: mol_type = other RNA
atgtagaaaggcatgaagcagtt

SEQ ID NO: 645 - RNA, 22 nt, synthetic construct
  modified_base 1: mod_base = OTHER; note = Inverted abasic nucleotide
  misc_feature 1..22: note = source = /note="Description of Artificial Sequence: Synthetic oligonucleotide"
  source 1..22: mol_type = other RNA
nctgcttcatgcctttctacat

SEQ ID NO: 646 - RNA, 23 nt, synthetic construct
  misc_feature 1..23: note = source = /note="Description of Artificial Sequence: Synthetic oligonucleotide"
  source 1..23: mol_type = other RNA
atgtagaaaggcatgaagcagtt

SEQ ID NO: 647 - RNA, 21 nt, synthetic construct
  modified_base 21: mod_base = OTHER; note = Inverted abasic nucleotide
  misc_feature 1..21: note = source = /note="Description of Artificial Sequence: Synthetic oligonucleotide"
  source 1..21: mol_type = other RNA
ctgcttcatgcctttctacan

SEQ ID NO: 648 - RNA, 23 nt, synthetic construct
  misc_feature 1..23: note = source = /note="Description of Artificial Sequence: Synthetic oligonucleotide"
  source 1..23: mol_type = other RNA
atgtagaaaggcatgaagcagtt

SEQ ID NO: 649 - RNA, 22 nt, synthetic construct
  modified_base 1: mod_base = OTHER; note = Inverted abasic nucleotide
  misc_feature 1..22: note = source = /note="Description of Artificial Sequence: Synthetic oligonucleotide"
  source 1..22: mol_type = other RNA
nctgcttcatgcctttctacat

SEQ ID NO: 650 - RNA, 23 nt, synthetic construct
  misc_feature 1..23: note = source = /note="Description of Artificial Sequence: Synthetic oligonucleotide"
  source 1..23: mol_type = other RNA
atgtagaaaggcatgaagcagtt

SEQ ID NO: 651 - DNA, 22 bp, synthetic construct
  modified_base 1: mod_base = OTHER; note = Inverted abasic nucleotide
  misc_feature 1..22: note = source = /note="Description of Artificial Sequence: Synthetic oligonucleotide"
  misc_feature 1..22: note = source = /note="Description of Combined DNA/RNA Molecule: Synthetic oligonucleotide"
  source 1..22: mol_type = other DNA
nctgcttcatgcctttctacat

SEQ ID NO: 652 - RNA, 23 nt, synthetic construct
  misc_feature 1..23: note = source = /note="Description of Artificial Sequence: Synthetic oligonucleotide"
  source 1..23: mol_type = other RNA
atgtagaaaggcatgaagcagtt

SEQ ID NO: 653 - RNA, 21 nt, synthetic construct
  misc_feature 1..21: note = source = /note="Description of Artificial Sequence: Synthetic oligonucleotide"
  source 1..21: mol_type = other RNA
ctgcttcatgcctttctacat

SEQ ID NO: 654 - RNA, 23 nt, synthetic construct
  misc_feature 1..23: note = source = /note="Description of Artificial Sequence: Synthetic oligonucleotide"
  source 1..23: mol_type = other RNA
atgtagaaaggcatgaagcagtt

SEQ ID NO: 655 - RNA, 22 nt, synthetic construct
  modified_base 1: mod_base = OTHER; note = Inverted abasic nucleotide
  misc_feature 1..22: note = source = /note="Description of Artificial Sequence: Synthetic oligonucleotide"
  source 1..22: mol_type = other RNA
nctgcttcatgcctttctacat

SEQ ID NO: 656 - RNA, 23 nt, synthetic construct
  misc_feature 1..23: note = source = /note="Description of Artificial Sequence: Synthetic oligonucleotide"
  source 1..23: mol_type = other RNA
atgtagaaaggcatgaagcagtt

SEQ ID NO: 657 - RNA, 21 nt, synthetic construct
  misc_feature 1..21: note = source = /note="Description of Artificial Sequence: Synthetic oligonucleotide"
  source 1..21: mol_type = other RNA
ctgcttcatgcctttctacat

SEQ ID NO: 658 - RNA, 23 nt, synthetic construct
  misc_feature 1..23: note = source = /note="Description of Artificial Sequence: Synthetic oligonucleotide"
  source 1..23: mol_type = other RNA
atgtagaaaggcatgaagcagtt

SEQ ID NO: 659 - RNA, 21 nt, synthetic construct
  modified_base 21: mod_base = OTHER; note = Inverted abasic nucleotide
  misc_feature 1..21: note = source = /note="Description of Artificial Sequence: Synthetic oligonucleotide"
  source 1..21: mol_type = other RNA
ctgcttcatgcctttctacan

SEQ ID NO: 660 - RNA, 23 nt, synthetic construct
  misc_feature 1..23: note = source = /note="Description of Artificial Sequence: Synthetic oligonucleotide"
  source 1..23: mol_type = other RNA
atgtagaaaggcatgaagcagtt

SEQ ID NO: 661 - RNA, 22 nt, synthetic construct
  modified_base 1: mod_base = OTHER; note = Inverted abasic nucleotide
  misc_feature 1..22: note = source = /note="Description of Artificial Sequence: Synthetic oligonucleotide"
  source 1..22: mol_type = other RNA
nctgcttcatgcctttctacat

SEQ ID NO: 662 - RNA, 23 nt, synthetic construct
  misc_feature 1..23: note = source = /note="Description of Artificial Sequence: Synthetic oligonucleotide"
  source 1..23: mol_type = other RNA
atgtagaaaggcatgaagcagtt

SEQ ID NO: 663 - RNA, 21 nt, synthetic construct
  misc_feature 1..21: note = source = /note="Description of Artificial Sequence: Synthetic oligonucleotide"
  source 1..21: mol_type = other RNA
ctgcttcatgcctttctacat

SEQ ID NO: 664 - RNA, 23 nt, synthetic construct
  misc_feature 1..23: note = source = /note="Description of Artificial Sequence: Synthetic oligonucleotide"
  source 1..23: mol_type = other RNA
atgtagaaaggcatgaagcagtt

SEQ ID NO: 665 - RNA, 21 nt, synthetic construct
  modified_base 21: mod_base = OTHER; note = Inverted abasic nucleotide
  misc_feature 1..21: note = source = /note="Description of Artificial Sequence: Synthetic oligonucleotide"
  source 1..21: mol_type = other RNA
ctgcttcatgcctttctacan

SEQ ID NO: 666 - RNA, 23 nt, synthetic construct
  misc_feature 1..23: note = source = /note="Description of Artificial Sequence: Synthetic oligonucleotide"
  source 1..23: mol_type = other RNA
atgtagaaaggcatgaagcagtt

SEQ ID NO: 667 - RNA, 22 nt, synthetic construct
  modified_base 1: mod_base = OTHER; note = Inverted abasic nucleotide
  misc_feature 1..22: note = source = /note="Description of Artificial Sequence: Synthetic oligonucleotide"
  source 1..22: mol_type = other RNA
nctgcttcatgcctttctacat

SEQ ID NO: 668 - RNA, 23 nt, synthetic construct
  misc_feature 1..23: note = source = /note="Description of Artificial Sequence: Synthetic oligonucleotide"
  source 1..23: mol_type = other RNA
atgtagaaaggcatgaagcagtt

SEQ ID NO: 669 - RNA, 21 nt, synthetic construct
  modified_base 21: mod_base = OTHER; note = Inverted abasic nucleotide
  misc_feature 1..21: note = source = /note="Description of Artificial Sequence: Synthetic oligonucleotide"
  source 1..21: mol_type = other RNA
ctgcttcatgcctttctacan

SEQ ID NO: 670 - RNA, 23 nt, synthetic construct
  misc_feature 1..23: note = source = /note="Description of Artificial Sequence: Synthetic oligonucleotide"
  source 1..23: mol_type = other RNA
atgtagaaaggcatgaagcagtt

SEQ ID NO: 671 - RNA, 22 nt, synthetic construct
  modified_base 1: mod_base = OTHER; note = Inverted abasic nucleotide
  misc_feature 1..22: note = source = /note="Description of Artificial Sequence: Synthetic oligonucleotide"
  source 1..22: mol_type = other RNA
nctgcttcatgcctttctacat

SEQ ID NO: 672 - RNA, 23 nt, synthetic construct
  misc_feature 1..23: note = source = /note="Description of Artificial Sequence: Synthetic oligonucleotide"
  source 1..23: mol_type = other RNA
atgtagaaaggcatgaagcagtt

SEQ ID NO: 673 - RNA, 22 nt, synthetic construct
  modified_base 1: mod_base = OTHER; note = Inverted abasic nucleotide
  misc_feature 1..22: note = source = /note="Description of Artificial Sequence: Synthetic oligonucleotide"
  source 1..22: mol_type = other RNA
ngcttcatgcctttctacattt

SEQ ID NO: 674 - RNA, 21 nt, synthetic construct
  misc_feature 1..21: note = source = /note="Description of Artificial Sequence: Synthetic oligonucleotide"
  source 1..21: mol_type = other RNA
atgtagaaaggcatgaagctt

SEQ ID NO: 675 - RNA, 22 nt, synthetic construct
  modified_base 1: mod_base = OTHER; note = Inverted abasic nucleotide
  misc_feature 1..22: note = source = /note="Description of Artificial Sequence: Synthetic oligonucleotide"
  source 1..22: mol_type = other RNA
ngcttcatgcctttctacattt

SEQ ID NO: 676 - RNA, 21 nt, synthetic construct
  misc_feature 1..21: note = source = /note="Description of Artificial Sequence: Synthetic oligonucleotide"
  source 1..21: mol_type = other RNA
atgtagaaaggcatgaagctt

SEQ ID NO: 677 - RNA, 22 nt, synthetic construct
  modified_base 1: mod_base = OTHER; note = Inverted abasic nucleotide
  misc_feature 1..22: note = source = /note="Description of Artificial Sequence: Synthetic oligonucleotide"
  source 1..22: mol_type = other RNA
ngcttcatgcctttctacattt

SEQ ID NO: 678 - RNA, 21 nt, synthetic construct
  misc_feature 1..21: note = source = /note="Description of Artificial Sequence: Synthetic oligonucleotide"
  source 1..21: mol_type = other RNA
atgtagaaaggcatgaagctt

SEQ ID NO: 679 - RNA, 22 nt, synthetic construct
  modified_base 1: mod_base = OTHER; note = Inverted abasic nucleotide
  misc_feature 1..22: note = source = /note="Description of Artificial Sequence: Synthetic oligonucleotide"
  source 1..22: mol_type = other RNA
ngcttcatgcctttctacattt

SEQ ID NO: 680 - RNA, 21 nt, synthetic construct
  misc_feature 1..21: note = source = /note="Description of Artificial Sequence: Synthetic oligonucleotide"
  source 1..21: mol_type = other RNA
atgtagaaaggcatgaagctt

SEQ ID NO: 681 - RNA, 22 nt, synthetic construct
  modified_base 1: mod_base = OTHER; note = Inverted abasic nucleotide
  misc_feature 1..22: note = source = /note="Description of Artificial Sequence: Synthetic oligonucleotide"
  source 1..22: mol_type = other RNA
ngcttcatgcctttctacattt

SEQ ID NO: 682 - RNA, 21 nt, synthetic construct
  misc_feature 1..21: note = source = /note="Description of Artificial Sequence: Synthetic oligonucleotide"
  source 1..21: mol_type = other RNA
atgtagaaaggcatgaagctt

SEQ ID NO: 683 - RNA, 21 nt, synthetic construct
  misc_feature 1..21: note = source = /note="Description of Artificial Sequence: Synthetic oligonucleotide"
  source 1..21: mol_type = other RNA
ctgcttcatgcccttctacat

SEQ ID NO: 684 - RNA, 23 nt, synthetic construct
  misc_feature 1..23: note = source = /note="Description of Artificial Sequence: Synthetic oligonucleotide"
  source 1..23: mol_type = other RNA
atgtagaagggcatgaagcagtt

SEQ ID NO: 685 - RNA, 22 nt, synthetic construct
  modified_base 1: mod_base = OTHER; note = Inverted abasic nucleotide
  misc_feature 1..22: note = source = /note="Description of Artificial Sequence: Synthetic oligonucleotide"
  source 1..22: mol_type = other RNA
ngcttcatgcccttctacattt

SEQ ID NO: 686 - RNA, 21 nt, synthetic construct
  misc_feature 1..21: note = source = /note="Description of Artificial Sequence: Synthetic oligonucleotide"
  source 1..21: mol_type = other RNA
atgtagaagggcatgaagctt

SEQ ID NO: 687 - RNA, 22 nt, synthetic construct
  modified_base 1: mod_base = OTHER; note = Inverted abasic nucleotide
  misc_feature 1..22: note = source = /note="Description of Artificial Sequence: Synthetic oligonucleotide"
  source 1..22: mol_type = other RNA
ngcttcatgcccttctacattt

SEQ ID NO: 688 - RNA, 21 nt, synthetic construct
  misc_feature 1..21: note = source = /note="Description of Artificial Sequence: Synthetic oligonucleotide"
  source 1..21: mol_type = other RNA
atgtagaagggcatgaagctt

SEQ ID NO: 689 - RNA, 22 nt, synthetic construct
  modified_base 1: mod_base = OTHER; note = Inverted abasic nucleotide
  misc_feature 1..22: note = source = /note="Description of Artificial Sequence: Synthetic oligonucleotide"
  source 1..22: mol_type = other RNA
ngcttcatgcccttctacattt

SEQ ID NO: 690 - RNA, 21 nt, synthetic construct
  misc_feature 1..21: note = source = /note="Description of Artificial Sequence: Synthetic oligonucleotide"
  source 1..21: mol_type = other RNA
atgtagaagggcatgaagctt

SEQ ID NO: 691 - RNA, 21 nt, synthetic construct
  modified_base 21: mod_base = OTHER; note = Inverted abasic nucleotide
  misc_feature 1..21: note = source = /note="Description of Artificial Sequence: Synthetic oligonucleotide"
  source 1..21: mol_type = other RNA
ctgcttcatgcccttctacan

SEQ ID NO: 692 - RNA, 23 nt, synthetic construct
  misc_feature 1..23: note = source = /note="Description of Artificial Sequence: Synthetic oligonucleotide"
  source 1..23: mol_type = other RNA
atgtagaagggcatgaagcagtt

SEQ ID NO: 693 - RNA, 22 nt, synthetic construct
  modified_base 1: mod_base = OTHER; note = Inverted abasic nucleotide
  misc_feature 1..22: note = source = /note="Description of Artificial Sequence: Synthetic oligonucleotide"
  source 1..22: mol_type = other RNA
nctgcttcatgcccttctacat

SEQ ID NO: 694 - RNA, 23 nt, synthetic construct
  misc_feature 1..23: note = source = /note="Description of Artificial Sequence: Synthetic oligonucleotide"
  source 1..23: mol_type = other RNA
atgtagaagggcatgaagcagtt

SEQ ID NO: 695 - RNA, 22 nt, synthetic construct
  modified_base 1: mod_base = OTHER; note = Inverted abasic nucleotide
  misc_feature 1..22: note = source = /note="Description of Artificial Sequence: Synthetic oligonucleotide"
  source 1..22: mol_type = other RNA
ngcttcatgcccttctacattt

SEQ ID NO: 696 - RNA, 21 nt, synthetic construct
  misc_feature 1..21: note = source = /note="Description of Artificial Sequence: Synthetic oligonucleotide"
  source 1..21: mol_type = other RNA
atgtagaagggcatgaagctt

SEQ ID NO: 697 - RNA, 21 nt, synthetic construct
  misc_feature 1..21: note = source = /note="Description of Artificial Sequence: Synthetic oligonucleotide"
  source 1..21: mol_type = other RNA
atgttcctgcttcatgccttt

SEQ ID NO: 698 - RNA, 21 nt, synthetic construct
  misc_feature 1..21: note = source = /note="Description of Artificial Sequence: Synthetic oligonucleotide"
  source 1..21: mol_type = other RNA
aggcatgaagcaggaacattt

SEQ ID NO: 699 - RNA, 21 nt, synthetic construct
  misc_feature 1..21: note = source = /note="Description of Artificial Sequence: Synthetic oligonucleotide"
  source 1..21: mol_type = other RNA
tgttcctgcttcatgcctttt

SEQ ID NO: 700 - RNA, 21 nt, synthetic construct
  misc_feature 1..21: note = source = /note="Description of Artificial Sequence: Synthetic oligonucleotide"
  source 1..21: mol_type = other RNA
aaggcatgaagcaggaacatt

SEQ ID NO: 701 - RNA, 21 nt, synthetic construct
  misc_feature 1..21: note = source = /note="Description of Artificial Sequence: Synthetic oligonucleotide"
  source 1..21: mol_type = other RNA
tgcctttctacagtggccttt

SEQ ID NO: 702 - RNA, 21 nt, synthetic construct
  misc_feature 1..21: note = source = /note="Description of Artificial Sequence: Synthetic oligonucleotide"
  source 1..21: mol_type = other RNA
aggccactgtagaaaggcatt

SEQ ID NO: 703 - RNA, 21 nt, synthetic construct
  misc_feature 1..21: note = source = /note="Description of Artificial Sequence: Synthetic oligonucleotide"
  source 1..21: mol_type = other RNA
cgtacttcgtccttgtatgtt

SEQ ID NO: 704 - RNA, 21 nt, synthetic construct
  misc_feature 1..21: note = source = /note="Description of Artificial Sequence: Synthetic oligonucleotide"
  source 1..21: mol_type = other RNA
catacaaggacgaagtacgtt

SEQ ID NO: 705 - DNA, 22 bp, synthetic construct
  modified_base 1: mod_base = OTHER; note = Inverted abasic nucleotide
  misc_feature 1..22: note = source = /note="Description of Artificial Sequence: Synthetic oligonucleotide"
  misc_feature 1..22: note = source = /note="Description of Combined DNA/RNA Molecule: Synthetic oligonucleotide"
  source 1..22: mol_type = other DNA
ngcttcatgcccttctacattt

SEQ ID NO: 706 - RNA, 21 nt, synthetic construct
  misc_feature 1..21: note = source = /note="Description of Artificial Sequence: Synthetic oligonucleotide"
  source 1..21: mol_type = other RNA
atgtagaagggcatgaagctt

SEQ ID NO: 707 - RNA, 22 nt, synthetic construct
  modified_base 1: mod_base = OTHER; note = Inverted abasic nucleotide
  misc_feature 1..22: note = source = /note="Description of Artificial Sequence: Synthetic oligonucleotide"
  source 1..22: mol_type = other RNA
ngcttcatgcccttctacattt

SEQ ID NO: 708 - RNA, 21 nt, synthetic construct
  misc_feature 1..21: note = source = /note="Description of Artificial Sequence: Synthetic oligonucleotide"
  source 1..21: mol_type = other RNA
atgtagaagggcatgaagctt

SEQ ID NO: 709 - RNA, 22 nt, synthetic construct
  modified_base 1: mod_base = OTHER; note = Inverted abasic nucleotide
  misc_feature 1..22: note = source = /note="Description of Artificial Sequence: Synthetic oligonucleotide"
  source 1..22: mol_type = other RNA
ngcttcatgcccttctacattt

SEQ ID NO: 710 - RNA, 21 nt, synthetic construct
  misc_feature 1..21: note = source = /note="Description of Artificial Sequence: Synthetic oligonucleotide"
  source 1..21: mol_type = other RNA
atgtagaagggcatgaagctt

SEQ ID NO: 711 - RNA, 22 nt, synthetic construct
  modified_base 1: mod_base = OTHER; note = Inverted abasic nucleotide
  misc_feature 1..22: note = source = /note="Description of Artificial Sequence: Synthetic oligonucleotide"
  source 1..22: mol_type = other RNA
ngcttcatgcccttctacattt

SEQ ID NO: 712 - RNA, 21 nt, synthetic construct
  misc_feature 1..21: note = source = /note="Description of Artificial Sequence: Synthetic oligonucleotide"
  source 1..21: mol_type = other RNA
atgtagaagggcatgaagctt

SEQ ID NO: 713 - RNA, 22 nt, synthetic construct
  modified_base 1: mod_base = OTHER; note = Inverted abasic nucleotide
  misc_feature 1..22: note = source = /note="Description of Artificial Sequence: Synthetic oligonucleotide"
  source 1..22: mol_type = other RNA
ngcttcatgcccttctacattt

SEQ ID NO: 714 - RNA, 21 nt, synthetic construct
  misc_feature 1..21: note = source = /note="Description of Artificial Sequence: Synthetic oligonucleotide"
  source 1..21: mol_type = other RNA
atgtagaagggcatgaagctt

SEQ ID NO: 715 - RNA, 22 nt, synthetic construct
  modified_base 1: mod_base = OTHER; note = Inverted abasic nucleotide
  misc_feature 1..22: note = source = /note="Description of Artificial Sequence: Synthetic oligonucleotide"
  source 1..22: mol_type = other RNA
ngcttcatgcccttctacattt

SEQ ID NO: 716 - RNA, 21 nt, synthetic construct
  misc_feature 1..21: note = source = /note="Description of Artificial Sequence: Synthetic oligonucleotide"
  source 1..21: mol_type = other RNA
atgtagaagggcatgaagctt

SEQ ID NO: 717 - RNA, 22 nt, synthetic construct
  modified_base 1: mod_base = OTHER; note = Inverted abasic nucleotide
  misc_feature 1..22: note = source = /note="Description of Artificial Sequence: Synthetic oligonucleotide"
  source 1..22: mol_type = other RNA
ncctgcttcatgcctttctatt

SEQ ID NO: 718 - RNA, 21 nt, synthetic construct
  misc_feature 1..21: note = source = /note="Description of Artificial Sequence: Synthetic oligonucleotide"
  source 1..21: mol_type = other RNA
tagaaaggcatgaagcaggtt

SEQ ID NO: 719 - RNA, 22 nt, synthetic construct
  modified_base 1: mod_base = OTHER; note = Inverted abasic nucleotide
  misc_feature 1..22: note = source = /note="Description of Artificial Sequence: Synthetic oligonucleotide"
  source 1..22: mol_type = other RNA
ncctgcttcatgcctttctatt

SEQ ID NO: 720 - RNA, 21 nt, synthetic construct
  misc_feature 1..21: note = source = /note="Description of Artificial Sequence: Synthetic oligonucleotide"
  source 1..21: mol_type = other RNA
tagaaaggcatgaagcaggtt

SEQ ID NO: 721 - RNA, 21 nt, synthetic construct
  modified_base 21: mod_base = OTHER; note = Inverted abasic nucleotide
  misc_feature 1..21: note = source = /note="Description of Artificial Sequence: Synthetic oligonucleotide"
  source 1..21: mol_type = other RNA
ttcctgcttcatgcctttctn

SEQ ID NO: 722 - RNA, 23 nt, synthetic construct
  misc_feature 1..23: note = source = /note="Description of Artificial Sequence: Synthetic oligonucleotide"
  source 1..23: mol_type = other RNA
tagaaaggcatgaagcaggaatt

SEQ ID NO: 723 - RNA, 22 nt, synthetic construct
  modified_base 1: mod_base = OTHER; note = Inverted abasic nucleotide
  misc_feature 1..22: note = source = /note="Description of Artificial Sequence: Synthetic oligonucleotide"
  source 1..22: mol_type = other RNA
ncctgcttcatgcctttctatt

SEQ ID NO: 724 - RNA, 21 nt, synthetic construct
  misc_feature 1..21: note = source = /note="Description of Artificial Sequence: Synthetic oligonucleotide"
  source 1..21: mol_type = other RNA
tagaaaggcatgaagcaggtt

SEQ ID NO: 725 - RNA, 21 nt, synthetic construct
  modified_base 21: mod_base = OTHER; note = Inverted abasic nucleotide
  misc_feature 1..21: note = source = /note="Description of Artificial Sequence: Synthetic oligonucleotide"
  source 1..21: mol_type = other RNA
ttcctgcttcatgcctttctn

SEQ ID NO: 726 - RNA, 23 nt, synthetic construct
  misc_feature 1..23: note = source = /note="Description of Artificial Sequence: Synthetic oligonucleotide"
  source 1..23: mol_type = other RNA
tagaaaggcatgaagcaggaatt

SEQ ID NO: 727 - RNA, 22 nt, synthetic construct
  modified_base 1: mod_base = OTHER; note = Inverted abasic nucleotide
  misc_feature 1..22: note = source = /note="Description of Artificial Sequence: Synthetic oligonucleotide"
  source 1..22: mol_type = other RNA
natgcctttctacagtggcttt

SEQ ID NO: 728 - RNA, 21 nt, synthetic construct
  misc_feature 1..21: note = source = /note="Description of Artificial Sequence: Synthetic oligonucleotide"
  source 1..21: mol_type = other RNA
agccactgtagaaaggcattt

SEQ ID NO: 729 - RNA, 22 nt, synthetic construct
  modified_base 1: mod_base = OTHER; note = Inverted abasic nucleotide
  misc_feature 1..22: note = source = /note="Description of Artificial Sequence: Synthetic oligonucleotide"
  source 1..22: mol_type = other RNA
natgcctttctacagtggcttt

SEQ ID NO: 730 - RNA, 21 nt, synthetic construct
  misc_feature 1..21: note = source = /note="Description of Artificial Sequence: Synthetic oligonucleotide"
  source 1..21: mol_type = other RNA
agccactgtagaaaggcattt

SEQ ID NO: 731 - RNA, 22 nt, synthetic construct
  modified_base 1: mod_base = OTHER; note = Inverted abasic nucleotide
  misc_feature 1..22: note = source = /note="Description of Artificial Sequence: Synthetic oligonucleotide"
  source 1..22: mol_type = other RNA
natgcctttctacagtggcttt

SEQ ID NO: 732 - RNA, 21 nt, synthetic construct
  misc_feature 1..21: note = source = /note="Description of Artificial Sequence: Synthetic oligonucleotide"
  source 1..21: mol_type = other RNA
agccactgtagaaaggcattt

SEQ ID NO: 733 - RNA, 21 nt, synthetic construct
  modified_base 21: mod_base = OTHER; note = Inverted abasic nucleotide
  misc_feature 1..21: note = source = /note="Description of Artificial Sequence: Synthetic oligonucleotide"
  source 1..21: mol_type = other RNA
tcatgcctttctacagtggcn

SEQ ID NO: 734 - RNA, 23 nt, synthetic construct
  misc_feature 1..23: note = source = /note="Description of Artificial Sequence: Synthetic oligonucleotide"
  source 1..23: mol_type = other RNA
agccactgtagaaaggcatgatt

SEQ ID NO: 735 - RNA, 22 nt, synthetic construct
  modified_base 1: mod_base = OTHER; note = Inverted abasic nucleotide
  misc_feature 1..22: note = source = /note="Description of Artificial Sequence: Synthetic oligonucleotide"
  source 1..22: mol_type = other RNA
natgcctttctacagtggcttt

SEQ ID NO: 736 - RNA, 21 nt, synthetic construct
  misc_feature 1..21: note = source = /note="Description of Artificial Sequence: Synthetic oligonucleotide"
  source 1..21: mol_type = other RNA
agccactgtagaaaggcattt

SEQ ID NO: 737 - RNA, 22 nt, synthetic construct
  modified_base 1: mod_base = OTHER; note = Inverted abasic nucleotide
  misc_feature 1..22: note = source = /note="Description of Artificial Sequence: Synthetic oligonucleotide"
  source 1..22: mol_type = other RNA
ntcatgcctttctacagtggct

SEQ ID NO: 738 - RNA, 23 nt, synthetic construct
  misc_feature 1..23: note = source = /note="Description of Artificial Sequence: Synthetic oligonucleotide"
  source 1..23: mol_type = other RNA
agccactgtagaaaggcatgatt

SEQ ID NO: 739 - RNA, 22 nt, synthetic construct
  modified_base 1: mod_base = OTHER; note = Inverted abasic nucleotide
  misc_feature 1..22: note = source = /note="Description of Artificial Sequence: Synthetic oligonucleotide"
  source 1..22: mol_type = other RNA
ntgcttcatgcctttctacagt

SEQ ID NO: 740 - RNA, 23 nt, synthetic construct
  misc_feature 1..23: note = source = /note="Description of Artificial Sequence: Synthetic oligonucleotide"
  source 1..23: mol_type = other RNA
actgtagaaaggcatgaagcatt

SEQ ID NO: 741 - RNA, 22 nt, synthetic construct
  modified_base 1: mod_base = OTHER; note = Inverted abasic nucleotide
  misc_feature 1..22: note = source = /note="Description of Artificial Sequence: Synthetic oligonucleotide"
  source 1..22: mol_type = other RNA
ncttcatgcctttctacagttt

SEQ ID NO: 742 - RNA, 21 nt, synthetic construct
  misc_feature 1..21: note = source = /note="Description of Artificial Sequence: Synthetic oligonucleotide"
  source 1..21: mol_type = other RNA
actgtagaaaggcatgaagtt

SEQ ID NO: 743 - RNA, 21 nt, synthetic construct
  modified_base 21: mod_base = OTHER; note = Inverted abasic nucleotide
  misc_feature 1..21: note = source = /note="Description of Artificial Sequence: Synthetic oligonucleotide"
  source 1..21: mol_type = other RNA
tgcttcatgcctttctacagn

SEQ ID NO: 744 - RNA, 23 nt, synthetic construct
  misc_feature 1..23: note = source = /note="Description of Artificial Sequence: Synthetic oligonucleotide"
  source 1..23: mol_type = other RNA
actgtagaaaggcatgaagcatt

SEQ ID NO: 745 - RNA, 22 nt, synthetic construct
  modified_base 1: mod_base = OTHER; note = Inverted abasic nucleotide
  misc_feature 1..22: note = source = /note="Description of Artificial Sequence: Synthetic oligonucleotide"
  source 1..22: mol_type = other RNA
ncttcatgcctttctacagttt

SEQ ID NO: 746 - RNA, 21 nt, synthetic construct
  misc_feature 1..21: note = source = /note="Description of Artificial Sequence: Synthetic oligonucleotide"
  source 1..21: mol_type = other RNA
actgtagaaaggcatgaagtt

SEQ ID NO: 747 - RNA, 21 nt, synthetic construct
  modified_base 21: mod_base = OTHER; note = Inverted abasic nucleotide
  misc_feature 1..21: note = source = /note="Description of Artificial Sequence: Synthetic oligonucleotide"
  source 1..21: mol_type = other RNA
tgcttcatgcctttctacagn

SEQ ID NO: 748 - RNA, 23 nt, synthetic construct
  misc_feature 1..23: note = source = /note="Description of Artificial Sequence: Synthetic oligonucleotide"
  source 1..23: mol_type = other RNA
actgtagaaaggcatgaagcatt

SEQ ID NO: 749 - RNA, 22 nt, synthetic construct
  modified_base 1: mod_base = OTHER; note = Inverted abasic nucleotide
  misc_feature 1..22: note = source = /note="Description of Artificial Sequence: Synthetic oligonucleotide"
  source 1..22: mol_type = other RNA
ntgcttcatgcctttctacagt

SEQ ID NO: 750 - RNA, 23 nt, synthetic construct
  misc_feature 1..23: note = source = /note="Description of Artificial Sequence: Synthetic oligonucleotide"
  source 1..23: mol_type = other RNA
actgtagaaaggcatgaagcatt

SEQ ID NO: 751 - RNA, 22 nt, synthetic construct
  modified_base 1: mod_base = OTHER; note = Inverted abasic nucleotide
  misc_feature 1..22: note = source = /note="Description of Artificial Sequence: Synthetic oligonucleotide"
  source 1..22: mol_type = other RNA
ntgcttcatgcctttctacagt

SEQ ID NO: 752 - RNA, 23 nt, synthetic construct
  misc_feature 1..23: note = source = /note="Description of Artificial Sequence: Synthetic oligonucleotide"
  source 1..23: mol_type = other RNA
actgtagaaaggcatgaagcatt

SEQ ID NO: 753 - RNA, 22 nt, synthetic construct
  modified_base 1: mod_base = OTHER; note = Inverted abasic nucleotide
  misc_feature 1..22: note = source = /note="Description of Artificial Sequence: Synthetic oligonucleotide"
  source 1..22: mol_type = other RNA
ntgcttcatgcctttctacagt

SEQ ID NO: 754 - RNA, 23 nt, synthetic construct
  misc_feature 1..23: note = source = /note="Description of Artificial Sequence: Synthetic oligonucleotide"
  source 1..23: mol_type = other RNA
actgtagaaaggcatgaagcatt

SEQ ID NO: 755 - RNA, 22 nt, synthetic construct
  modified_base 1: mod_base = OTHER; note = Inverted abasic nucleotide
  misc_feature 1..22: note = source = /note="Description of Artificial Sequence: Synthetic oligonucleotide"
  source 1..22: mol_type = other RNA
ntgcttcatgcctttctacagt

SEQ ID NO: 756 - RNA, 23 nt, synthetic construct
  misc_feature 1..23: note = source = /note="Description of Artificial Sequence: Synthetic oligonucleotide"
  source 1..23: mol_type = other RNA
actgtagaaaggcatgaagcatt

SEQ ID NO: 757 - RNA, 22 nt, synthetic construct
  modified_base 1: mod_base = OTHER; note = Inverted abasic nucleotide
  misc_feature 1..22: note = source = /note="Description of Artificial Sequence: Synthetic oligonucleotide"
  source 1..22: mol_type = other RNA
ngttcctgcttcatgccttttt

SEQ ID NO: 758 - RNA, 21 nt, synthetic construct
  misc_feature 1..21: note = source = /note="Description of Artificial Sequence: Synthetic oligonucleotide"
  source 1..21: mol_type = other RNA
aaaggcatgaagcaggaactt

SEQ ID NO: 759 - RNA, 22 nt, synthetic construct
  modified_base 1: mod_base = OTHER; note = Inverted abasic nucleotide
  misc_feature 1..22: note = source = /note="Description of Artificial Sequence: Synthetic oligonucleotide"
  source 1..22: mol_type = other RNA
ncctgcttcatgcctttctatt

SEQ ID NO: 760 - RNA, 21 nt, synthetic construct
  misc_feature 1..21: note = source = /note="Description of Artificial Sequence: Synthetic oligonucleotide"
  source 1..21: mol_type = other RNA
tagaaaggcatgaagcaggtt

SEQ ID NO: 761 - RNA, 22 nt, synthetic construct
  modified_base 1: mod_base = OTHER; note = Inverted abasic nucleotide
  misc_feature 1..22: note = source = /note="Description of Artificial Sequence: Synthetic oligonucleotide"
  source 1..22: mol_type = other RNA
ncttcatgcctttctacagttt

SEQ ID NO: 762 - RNA, 21 nt, synthetic construct
  misc_feature 1..21: note = source = /note="Description of Artificial Sequence: Synthetic oligonucleotide"
  source 1..21: mol_type = other RNA
actgtagaaaggcatgaagtt

SEQ ID NO: 763 - RNA, 22 nt, synthetic construct
  modified_base 1: mod_base = OTHER; note = Inverted abasic nucleotide
  misc_feature 1..22: note = source = /note="Description of Artificial Sequence: Synthetic oligonucleotide"
  source 1..22: mol_type = other RNA
nttcctgcttcatgcctttcta

SEQ ID NO: 764 - RNA, 23 nt, synthetic construct
  misc_feature 1..23: note = source = /note="Description of Artificial Sequence: Synthetic oligonucleotide"
  source 1..23: mol_type = other RNA
tagaaaggcatgaagcaggaatt

SEQ ID NO: 765 - RNA, 21 nt, synthetic construct
  modified_base 21: mod_base = OTHER; note = Inverted abasic nucleotide
  misc_feature 1..21: note = source = /note="Description of Artificial Sequence: Synthetic oligonucleotide"
  source 1..21: mol_type = other RNA
ttcctgcttcatgcctttctn

SEQ ID NO: 766 - RNA, 23 nt, synthetic construct
  misc_feature 1..23: note = source = /note="Description of Artificial Sequence: Synthetic oligonucleotide"
  source 1..23: mol_type = other RNA
tagaaaggcatgaagcaggaatt

SEQ ID NO: 767 - RNA, 22 nt, synthetic construct
  modified_base 1: mod_base = OTHER; note = Inverted abasic nucleotide
  misc_feature 1..22: note = source = /note="Description of Artificial Sequence: Synthetic oligonucleotide"
  source 1..22: mol_type = other RNA
nttcctgcttcatgcctttcta

SEQ ID NO: 768 - RNA, 23 nt, synthetic construct
  misc_feature 1..23: note = source = /note="Description of Artificial Sequence: Synthetic oligonucleotide"
  source 1..23: mol_type = other RNA
tagaaaggcatgaagcaggaatt

SEQ ID NO: 769 - RNA, 21 nt, synthetic construct
  modified_base 21: mod_base = OTHER; note = Inverted abasic nucleotide
  misc_feature 1..21: note = source = /note="Description of Artificial Sequence: Synthetic oligonucleotide"
  source 1..21: mol_type = other RNA
ttcctgcttcatgcctttctn

SEQ ID NO: 770 - RNA, 23 nt, synthetic construct
  misc_feature 1..23: note = source = /note="Description of Artificial Sequence: Synthetic oligonucleotide"
  source 1..23: mol_type = other RNA
tagaaaggcatgaagcaggaatt

SEQ ID NO: 771 - RNA, 22 nt, synthetic construct
  modified_base 1: mod_base = OTHER; note = Inverted abasic nucleotide
  misc_feature 1..22: note = source = /note="Description of Artificial Sequence: Synthetic oligonucleotide"
  source 1..22: mol_type = other RNA
nttcctgcttcatgcctttcta

SEQ ID NO: 772 - RNA, 23 nt, synthetic construct
  misc_feature 1..23: note = source = /note="Description of Artificial Sequence: Synthetic oligonucleotide"
  source 1..23: mol_type = other RNA
tagaaaggcatgaagcaggaatt

SEQ ID NO: 773 - RNA, 22 nt, synthetic construct
  modified_base 1: mod_base = OTHER; note = Inverted abasic nucleotide
  misc_feature 1..22: note = source = /note="Description of Artificial Sequence: Synthetic oligonucleotide"
  source 1..22: mol_type = other RNA
nttcctgcttcatgcctttcta

SEQ ID NO: 774 - RNA, 23 nt, synthetic construct
  misc_feature 1..23: note = source = /note="Description of Artificial Sequence: Synthetic oligonucleotide"
  source 1..23: mol_type = other RNA
tagaaaggcatgaagcaggaatt

SEQ ID NO: 775 - RNA, 22 nt, synthetic construct
  modified_base 1: mod_base = OTHER; note = Inverted abasic nucleotide
  misc_feature 1..22: note = source = /note="Description of Artificial Sequence: Synthetic oligonucleotide"
  source 1..22: mol_type = other RNA
nttcctgcttcatgcctttcta

SEQ ID NO: 776 - RNA, 23 nt, synthetic construct
  misc_feature 1..23: note = source = /note="Description of Artificial Sequence: Synthetic oligonucleotide"
  source 1..23: mol_type = other RNA
tagaaaggcatgaagcaggaatt

SEQ ID NO: 777 - RNA, 22 nt, synthetic construct
  modified_base 1: mod_base = OTHER; note = Inverted abasic nucleotide
  misc_feature 1..22: note = source = /note="Description of Artificial Sequence: Synthetic oligonucleotide"
  source 1..22: mol_type = other RNA
nttcctgcttcatgcctttcta

SEQ ID NO: 778 - RNA, 23 nt, synthetic construct
  misc_feature 1..23: note = source = /note="Description of Artificial Sequence: Synthetic oligonucleotide"
  source 1..23: mol_type = other RNA
tagaaaggcatgaagcaggaatt

SEQ ID NO: 779 - RNA, 22 nt, synthetic construct
  modified_base 1: mod_base = OTHER; note = Inverted abasic nucleotide
  misc_feature 1..22: note = source = /note="Description of Artificial Sequence: Synthetic oligonucleotide"
  source 1..22: mol_type = other RNA
nttcctgcttcatgcctttcta

SEQ ID NO: 780 - RNA, 23 nt, synthetic construct
  misc_feature 1..23: note = source = /note="Description of Artificial Sequence: Synthetic oligonucleotide"
  source 1..23: mol_type = other RNA
tagaaaggcatgaagcaggaatt

SEQ ID NO: 781 - RNA, 22 nt, synthetic construct
  modified_base 1: mod_base = OTHER; note = Inverted abasic nucleotide
  misc_feature 1..22: note = source = /note="Description of Artificial Sequence: Synthetic oligonucleotide"
  source 1..22: mol_type = other RNA
nttcctgcttcatgcctttcta

SEQ ID NO: 782 - RNA, 23 nt, synthetic construct
  misc_feature 1..23: note = source = /note="Description of Artificial Sequence: Synthetic oligonucleotide"
  source 1..23: mol_type = other RNA
tagaaaggcatgaagcaggaatt

SEQ ID NO: 783 - RNA, 22 nt, synthetic construct
  modified_base 1: mod_base = OTHER; note = Inverted abasic nucleotide
  misc_feature 1..22: note = source = /note="Description of Artificial Sequence: Synthetic oligonucleotide"
  source 1..22: mol_type = other RNA
ntcatgcctttctacagtggct

SEQ ID NO: 784 - RNA, 23 nt, synthetic construct
  misc_feature 1..23: note = source = /note="Description of Artificial Sequence: Synthetic oligonucleotide"
  source 1..23: mol_type = other RNA
agccactgtagaaaggcatgatt

SEQ ID NO: 785 - RNA, 21 nt, synthetic construct
  modified_base 21: mod_base = OTHER; note = Inverted abasic nucleotide
  misc_feature 1..21: note = source = /note="Description of Artificial Sequence: Synthetic oligonucleotide"
  source 1..21: mol_type = other RNA
tcatgcctttctacagtggcn

SEQ ID NO: 786 - RNA, 23 nt, synthetic construct
  misc_feature 1..23: note = source = /note="Description of Artificial Sequence: Synthetic oligonucleotide"
  source 1..23: mol_type = other RNA
agccactgtagaaaggcatgatt

SEQ ID NO: 787 - RNA, 22 nt, synthetic construct
  modified_base 1: mod_base = OTHER; note = Inverted abasic nucleotide
  misc_feature 1..22: note = source = /note="Description of Artificial Sequence: Synthetic oligonucleotide"
  source 1..22: mol_type = other RNA
ntcatgcctttctacagtggct

SEQ ID NO: 788 - RNA, 23 nt, synthetic construct
  misc_feature 1..23: note = source = /note="Description of Artificial Sequence: Synthetic oligonucleotide"
  source 1..23: mol_type = other RNA
agccactgtagaaaggcatgatt

SEQ ID NO: 789 - RNA, 21 nt, synthetic construct
  modified_base 21: mod_base = OTHER; note = Inverted abasic nucleotide
  misc_feature 1..21: note = source = /note="Description of Artificial Sequence: Synthetic oligonucleotide"
  source 1..21: mol_type = other RNA
tcatgcctttctacagtggcn

SEQ ID NO: 790 - RNA, 23 nt, synthetic construct
  misc_feature 1..23: note = source = /note="Description of Artificial Sequence: Synthetic oligonucleotide"
  source 1..23: mol_type = other RNA
agccactgtagaaaggcatgatt

SEQ ID NO: 791 - RNA, 22 nt, synthetic construct
  modified_base 1: mod_base = OTHER; note = Inverted abasic nucleotide
  misc_feature 1..22: note = source = /note="Description of Artificial Sequence: Synthetic oligonucleotide"
  source 1..22: mol_type = other RNA
ntcatgcctttctacagtggct

SEQ ID NO: 792 - RNA, 23 nt, synthetic construct
  misc_feature 1..23: note = source = /note="Description of Artificial Sequence: Synthetic oligonucleotide"
  source 1..23: mol_type = other RNA
agccactgtagaaaggcatgatt

SEQ ID NO: 793 - RNA, 22 nt, synthetic construct
  modified_base 1: mod_base = OTHER; note = Inverted abasic nucleotide
  misc_feature 1..22: note = source = /note="Description of Artificial Sequence: Synthetic oligonucleotide"
  source 1..22: mol_type = other RNA
ntcatgcctttctacagtggct

SEQ ID NO: 794 - RNA, 23 nt, synthetic construct
  misc_feature 1..23: note = source = /note="Description of Artificial Sequence: Synthetic oligonucleotide"
  source 1..23: mol_type = other RNA
agccactgtagaaaggcatgatt

SEQ ID NO: 795 - RNA, 21 nt, synthetic construct
  modified_base 21: mod_base = OTHER; note = Inverted abasic nucleotide
  misc_feature 1..21: note = source = /note="Description of Artificial Sequence: Synthetic oligonucleotide"
  source 1..21: mol_type = other RNA
tcatgcctttctacagtggcn

SEQ ID NO: 796 - RNA, 23 nt, synthetic construct
  misc_feature 1..23: note = source = /note="Description of Artificial Sequence: Synthetic oligonucleotide"
  source 1..23: mol_type = other RNA
agccactgtagaaaggcatgatt

SEQ ID NO: 797 - RNA, 22 nt, synthetic construct
  modified_base 1: mod_base = OTHER; note = Inverted abasic nucleotide
  misc_feature 1..22: note = source = /note="Description of Artificial Sequence: Synthetic oligonucleotide"
  source 1..22: mol_type = other RNA
ntcatgcctttctacagtggct

SEQ ID NO: 798 - RNA, 23 nt, synthetic construct
  misc_feature 1..23: note = source = /note="Description of Artificial Sequence: Synthetic oligonucleotide"
  source 1..23: mol_type = other RNA
agccactgtagaaaggcatgatt

SEQ ID NO: 799 - RNA, 22 nt, synthetic construct
  modified_base 1: mod_base = OTHER; note = Inverted abasic nucleotide
  misc_feature 1..22: note = source = /note="Description of Artificial Sequence: Synthetic oligonucleotide"
  source 1..22: mol_type = other RNA
ntcatgcctttctacagtggct

SEQ ID NO: 800 - RNA, 23 nt, synthetic construct
  misc_feature 1..23: note = source = /note="Description of Artificial Sequence: Synthetic oligonucleotide"
  source 1..23: mol_type = other RNA
agccactgtagaaaggcatgatt

SEQ ID NO: 801 - RNA, 22 nt, synthetic construct
  modified_base 1: mod_base = OTHER; note = Inverted abasic nucleotide
  misc_feature 1..22: note = source = /note="Description of Artificial Sequence: Synthetic oligonucleotide"
  source 1..22: mol_type = other RNA
ntcatgcctttctacagtggct

SEQ ID NO: 802 - RNA, 23 nt, synthetic construct
  misc_feature 1..23: note = source = /note="Description of Artificial Sequence: Synthetic oligonucleotide"
  source 1..23: mol_type = other RNA
agccactgtagaaaggcatgatt

SEQ ID NO: 803 - RNA, 22 nt, synthetic construct
  modified_base 1: mod_base = OTHER; note = Inverted abasic nucleotide
  misc_feature 1..22: note = source = /note="Description of Artificial Sequence: Synthetic oligonucleotide"
  source 1..22: mol_type = other RNA
ntgcttcatgcctttctacagt

SEQ ID NO: 804 - RNA, 23 nt, synthetic construct
  misc_feature 1..23: note = source = /note="Description of Artificial Sequence: Synthetic oligonucleotide"
  source 1..23: mol_type = other RNA
actgtagaaaggcatgaagcatt

SEQ ID NO: 805 - RNA, 21 nt, synthetic construct
  modified_base 21: mod_base = OTHER; note = Inverted abasic nucleotide
  misc_feature 1..21: note = source = /note="Description of Artificial Sequence: Synthetic oligonucleotide"
  source 1..21: mol_type = other RNA
tgcttcatgcctttctacagn

SEQ ID NO: 806 - RNA, 23 nt, synthetic construct
  misc_feature 1..23: note = source = /note="Description of Artificial Sequence: Synthetic oligonucleotide"
  source 1..23: mol_type = other RNA
actgtagaaaggcatgaagcatt

SEQ ID NO: 807 - RNA, 21 nt, synthetic construct
  modified_base 21: mod_base = OTHER; note = Inverted abasic nucleotide
  misc_feature 1..21: note = source = /note="Description of Artificial Sequence: Synthetic oligonucleotide"
  source 1..21: mol_type = other RNA
tgcttcatgcctttctacagn

SEQ ID NO: 808 - RNA, 23 nt, synthetic construct
  misc_feature 1..23: note = source = /note="Description of Artificial Sequence: Synthetic oligonucleotide"
  source 1..23: mol_type = other RNA
actgtagaaaggcatgaagcatt

SEQ ID NO: 809 - RNA, 22 nt, synthetic construct
  modified_base 1: mod_base = OTHER; note = Inverted abasic nucleotide
  misc_feature 1..22: note = source = /note="Description of Artificial Sequence: Synthetic oligonucleotide"
  source 1..22: mol_type = other RNA
ntgcttcatgcctttctacagt

SEQ ID NO: 810 - RNA, 23 nt, synthetic construct
  misc_feature 1..23: note = source = /note="Description of Artificial Sequence: Synthetic oligonucleotide"
  source 1..23: mol_type = other RNA
actgtagaaaggcatgaagcatt

SEQ ID NO: 811 - RNA, 22 nt, synthetic construct
  modified_base 1: mod_base = OTHER; note = Inverted abasic nucleotide
  misc_feature 1..22: note = source = /note="Description of Artificial Sequence: Synthetic oligonucleotide"
  source 1..22: mol_type = other RNA
ncttcatgcctttctacagttt

SEQ ID NO: 812 - RNA, 21 nt, synthetic construct
  misc_feature 1..21: note = source = /note="Description of Artificial Sequence: Synthetic oligonucleotide"
  source 1..21: mol_type = other RNA
actgtagaaaggcatgaagtt

SEQ ID NO: 813 - RNA, 22 nt, synthetic construct
  modified_base 1: mod_base = OTHER; note = Inverted abasic nucleotide
  misc_feature 1..22: note = source = /note="Description of Artificial Sequence: Synthetic oligonucleotide"
  source 1..22: mol_type = other RNA
ntgcttcatgcctttctacagt

SEQ ID NO: 814 - RNA, 23 nt, synthetic construct
  misc_feature 1..23: note = source = /note="Description of Artificial Sequence: Synthetic oligonucleotide"
  source 1..23: mol_type = other RNA
actgtagaaaggcatgaagcatt

SEQ ID NO: 815 - RNA, 22 nt, synthetic construct
  modified_base 1: mod_base = OTHER; note = Inverted abasic nucleotide
  misc_feature 1..22: note = source = /note="Description of Artificial Sequence: Synthetic oligonucleotide"
  source 1..22: mol_type = other RNA
ngcttcatgcctttctacattt

SEQ ID NO: 816 - RNA, 21 nt, synthetic construct
  misc_feature 1..21: note = source = /note="Description of Artificial Sequence: Synthetic oligonucleotide"
  source 1..21: mol_type = other RNA
atgtagaaaggcatgaagctt

SEQ ID NO: 817 - RNA, 22 nt, synthetic construct
  modified_base 1: mod_base = OTHER; note = Inverted abasic nucleotide
  misc_feature 1..22: note = source = /note="Description of Artificial Sequence: Synthetic oligonucleotide"
  source 1..22: mol_type = other RNA
ncatgcctttctacagtggttt

SEQ ID NO: 818 - RNA, 21 nt, synthetic construct
  misc_feature 1..21: note = source = /note="Description of Artificial Sequence: Synthetic oligonucleotide"
  source 1..21: mol_type = other RNA
accactgtagaaaggcatgtt

SEQ ID NO: 819 - RNA, 22 nt, synthetic construct
  modified_base 1: mod_base = OTHER; note = Inverted abasic nucleotide
  misc_feature 1..22: note = source = /note="Description of Artificial Sequence: Synthetic oligonucleotide"
  source 1..22: mol_type = other RNA
nctgcttcatgcctttctaatt

SEQ ID NO: 820 - RNA, 21 nt, synthetic construct
  misc_feature 1..21: note = source = /note="Description of Artificial Sequence: Synthetic oligonucleotide"
  source 1..21: mol_type = other RNA
ttagaaaggcatgaagcagtt

SEQ ID NO: 821 - RNA, 22 nt, synthetic construct
  modified_base 1: mod_base = OTHER; note = Inverted abasic nucleotide
  misc_feature 1..22: note = source = /note="Description of Artificial Sequence: Synthetic oligonucleotide"
  source 1..22: mol_type = other RNA
ngcttcatgcctttctacaatt

SEQ ID NO: 822 - RNA, 21 nt, synthetic construct
  misc_feature 1..21: note = source = /note="Description of Artificial Sequence: Synthetic oligonucleotide"
  source 1..21: mol_type = other RNA
ttgtagaaaggcatgaagctt

SEQ ID NO: 823 - RNA, 22 nt, synthetic construct
  modified_base 1: mod_base = OTHER; note = Inverted abasic nucleotide
  misc_feature 1..22: note = source = /note="Description of Artificial Sequence: Synthetic oligonucleotide"
  source 1..22: mol_type = other RNA
nttcatgcctttctacagtatt

SEQ ID NO: 824 - RNA, 21 nt, synthetic construct
  misc_feature 1..21: note = source = /note="Description of Artificial Sequence: Synthetic oligonucleotide"
  source 1..21: mol_type = other RNA
tactgtagaaaggcatgaatt

SEQ ID NO: 825 - RNA, 22 nt, synthetic construct
  modified_base 1: mod_base = OTHER; note = Inverted abasic nucleotide
  misc_feature 1..22: note = source = /note="Description of Artificial Sequence: Synthetic oligonucleotide"
  source 1..22: mol_type = other RNA
ngttcctgcttcatgccttttt

SEQ ID NO: 826 - RNA, 21 nt, synthetic construct
  misc_feature 1..21: note = source = /note="Description of Artificial Sequence: Synthetic oligonucleotide"
  source 1..21: mol_type = other RNA
aaaggcatgaagcaggaactt

SEQ ID NO: 827 - RNA, 21 nt, synthetic construct
  modified_base 21: mod_base = OTHER; note = Inverted abasic nucleotide
  misc_feature 1..21: note = source = /note="Description of Artificial Sequence: Synthetic oligonucleotide"
  source 1..21: mol_type = other RNA
atgttcctgcttcatgccttn

SEQ ID NO: 828 - RNA, 23 nt, synthetic construct
  misc_feature 1..23: note = source = /note="Description of Artificial Sequence: Synthetic oligonucleotide"
  source 1..23: mol_type = other RNA
aaaggcatgaagcaggaacattt

SEQ ID NO: 829 - RNA, 22 nt, synthetic construct
  modified_base 1: mod_base = OTHER; note = Inverted abasic nucleotide
  misc_feature 1..22: note = source = /note="Description of Artificial Sequence: Synthetic oligonucleotide"
  source 1..22: mol_type = other RNA
natgttcctgcttcatgccttt

SEQ ID NO: 830 - RNA, 23 nt, synthetic construct
  misc_feature 1..23: note = source = /note="Description of Artificial Sequence: Synthetic oligonucleotide"
  source 1..23: mol_type = other RNA
aaaggcatgaagcaggaacattt

SEQ ID NO: 831 - RNA, 22 nt, synthetic construct
  modified_base 1: mod_base = OTHER; note = Inverted abasic nucleotide
  misc_feature 1..22: note = source = /note="Description of Artificial Sequence: Synthetic oligonucleotide"
  source 1..22: mol_type = other RNA
ngttcctgcttcatgccttttt

SEQ ID NO: 832 - RNA, 21 nt, synthetic construct
  misc_feature 1..21: note = source = /note="Description of Artificial Sequence: Synthetic oligonucleotide"
  source 1..21: mol_type = other RNA
aaaggcatgaagcaggaactt

SEQ ID NO: 833 - RNA, 21 nt, synthetic construct
  modified_base 21: mod_base = OTHER; note = Inverted abasic nucleotide
  misc_feature 1..21: note = source = /note="Description of Artificial Sequence: Synthetic oligonucleotide"
  source 1..21: mol_type = other RNA
atgttcctgcttcatgccttn

SEQ ID NO: 834 - RNA, 23 nt, synthetic construct
  misc_feature 1..23: note = source = /note="Description of Artificial Sequence: Synthetic oligonucleotide"
  source 1..23: mol_type = other RNA
aaaggcatgaagcaggaacattt

SEQ ID NO: 835 - RNA, 22 nt, synthetic construct
  modified_base 1: mod_base = OTHER; note = Inverted abasic nucleotide
  misc_feature 1..22: note = source = /note="Description of Artificial Sequence: Synthetic oligonucleotide"
  source 1..22: mol_type = other RNA
natgttcctgcttcatgccttt

SEQ ID NO: 836 - RNA, 23 nt, synthetic construct
  misc_feature 1..23: note = source = /note="Description of Artificial Sequence: Synthetic oligonucleotide"
  source 1..23: mol_type = other RNA
aaaggcatgaagcaggaacattt

SEQ ID NO: 837 - RNA, 22 nt, synthetic construct
  modified_base 1: mod_base = OTHER; note = Inverted abasic nucleotide
  misc_feature 1..22: note = source = /note="Description of Artificial Sequence: Synthetic oligonucleotide"
  source 1..22: mol_type = other RNA
ngttcctgcttcatgccttttt

SEQ ID NO: 838 - RNA, 21 nt, synthetic construct
  misc_feature 1..21: note = source = /note="Description of Artificial Sequence: Synthetic oligonucleotide"
  source 1..21: mol_type = other RNA
aaaggcatgaagcaggaactt

SEQ ID NO: 839 - RNA, 21 nt, synthetic construct
  modified_base 21: mod_base = OTHER; note = Inverted abasic nucleotide
  misc_feature 1..21: note = source = /note="Description of Artificial Sequence: Synthetic oligonucleotide"
  source 1..21: mol_type = other RNA
atgttcctgcttcatgccttn

SEQ ID NO: 840 - RNA, 23 nt, synthetic construct
  misc_feature 1..23: note = source = /note="Description of Artificial Sequence: Synthetic oligonucleotide"
  source 1..23: mol_type = other RNA
aaaggcatgaagcaggaacattt

SEQ ID NO: 841 - RNA, 22 nt, synthetic construct
  modified_base 1: mod_base = OTHER; note = Inverted abasic nucleotide
  misc_feature 1..22: note = source = /note="Description of Artificial Sequence: Synthetic oligonucleotide"
  source 1..22: mol_type = other RNA
natgttcctgcttcatgccttt

SEQ ID NO: 842 - RNA, 23 nt, synthetic construct
  misc_feature 1..23: note = source = /note="Description of Artificial Sequence: Synthetic oligonucleotide"
  source 1..23: mol_type = other RNA
aaaggcatgaagcaggaacattt

SEQ ID NO: 843 - RNA, 22 nt, synthetic construct
  modified_base 1: mod_base = OTHER; note = Inverted abasic nucleotide
  misc_feature 1..22: note = source = /note="Description of Artificial Sequence: Synthetic oligonucleotide"
  source 1..22: mol_type = other RNA
natgttcctgcttcatgccttt

SEQ ID NO: 844 - RNA, 23 nt, synthetic construct
  misc_feature 1..23: note = source = /note="Description of Artificial Sequence: Synthetic oligonucleotide"
  source 1..23: mol_type = other RNA
aaaggcatgaagcaggaacattt

SEQ ID NO: 845 - RNA, 22 nt, synthetic construct
  modified_base 1: mod_base = OTHER; note = Inverted abasic nucleotide
  misc_feature 1..22: note = source = /note="Description of Artificial Sequence: Synthetic oligonucleotide"
  source 1..22: mol_type = other RNA
natgttcctgcttcatgccttt

SEQ ID NO: 846 - RNA, 23 nt, synthetic construct
  misc_feature 1..23: note = source = /note="Description of Artificial Sequence: Synthetic oligonucleotide"
  source 1..23: mol_type = other RNA
aaaggcatgaagcaggaacattt

SEQ ID NO: 847 - RNA, 22 nt, synthetic construct
  modified_base 1: mod_base = OTHER; note = Inverted abasic nucleotide
  misc_feature 1..22: note = source = /note="Description of Artificial Sequence: Synthetic oligonucleotide"
  source 1..22: mol_type = other RNA
ngcttcatgcctttctacagta

SEQ ID NO: 848 - RNA, 23 nt, synthetic construct
  misc_feature 1..23: note = source = /note="Description of Artificial Sequence: Synthetic oligonucleotide"
  source 1..23: mol_type = other RNA
tactgtagaaaggcatgaagctt

SEQ ID NO: 849 - RNA, 22 nt, synthetic construct
  modified_base 1: mod_base = OTHER; note = Inverted abasic nucleotide
  misc_feature 1..22: note = source = /note="Description of Artificial Sequence: Synthetic oligonucleotide"
  source 1..22: mol_type = other RNA
ngcttcatgcctttctacagta

SEQ ID NO: 850 - RNA, 23 nt, synthetic construct
  misc_feature 1..23: note = source = /note="Description of Artificial Sequence: Synthetic oligonucleotide"
  source 1..23: mol_type = other RNA
tactgtagaaaggcatgaagctt

SEQ ID NO: 851 - RNA, 22 nt, synthetic construct
  modified_base 1: mod_base = OTHER; note = Inverted abasic nucleotide
  misc_feature 1..22: note = source = /note="Description of Artificial Sequence: Synthetic oligonucleotide"
  source 1..22: mol_type = other RNA
nttcatgcctttctacagtatt

SEQ ID NO: 852 - RNA, 21 nt, synthetic construct
  misc_feature 1..21: note = source = /note="Description of Artificial Sequence: Synthetic oligonucleotide"
  source 1..21: mol_type = other RNA
tactgtagaaaggcatgaatt

SEQ ID NO: 853 - RNA, 22 nt, synthetic construct
  modified_base 1: mod_base = OTHER; note = Inverted abasic nucleotide
  misc_feature 1..22: note = source = /note="Description of Artificial Sequence: Synthetic oligonucleotide"
  source 1..22: mol_type = other RNA
ngcttcatgcctttctacagta

SEQ ID NO: 854 - RNA, 23 nt, synthetic construct
  misc_feature 1..23: note = source = /note="Description of Artificial Sequence: Synthetic oligonucleotide"
  source 1..23: mol_type = other RNA
tactgtagaaaggcatgaagctt

SEQ ID NO: 855 - RNA, 21 nt, synthetic construct
  modified_base 21: mod_base = OTHER; note = Inverted abasic nucleotide
  misc_feature 1..21: note = source = /note="Description of Artificial Sequence: Synthetic oligonucleotide"
  source 1..21: mol_type = other RNA
gcttcatgcctttctacagtn

SEQ ID NO: 856 - RNA, 23 nt, synthetic construct
  misc_feature 1..23: note = source = /note="Description of Artificial Sequence: Synthetic oligonucleotide"
  source 1..23: mol_type = other RNA
tactgtagaaaggcatgaagctt

SEQ ID NO: 857 - RNA, 22 nt, synthetic construct
  modified_base 1: mod_base = OTHER; note = Inverted abasic nucleotide
  misc_feature 1..22: note = source = /note="Description of Artificial Sequence: Synthetic oligonucleotide"
  source 1..22: mol_type = other RNA
ngcggcttcctgggcttctatt

SEQ ID NO: 858 - RNA, 21 nt, synthetic construct
  misc_feature 1..21: note = source = /note="Description of Artificial Sequence: Synthetic oligonucleotide"
  source 1..21: mol_type = other RNA
tagaagcccaggaagccgctt

SEQ ID NO: 859 - RNA, 22 nt, synthetic construct
  modified_base 1: mod_base = OTHER; note = Inverted abasic nucleotide
  misc_feature 1..22: note = source = /note="Description of Artificial Sequence: Synthetic oligonucleotide"
  source 1..22: mol_type = other RNA
natggcttccagatatgccttt

SEQ ID NO: 860 - RNA, 21 nt, synthetic construct
  misc_feature 1..21: note = source = /note="Description of Artificial Sequence: Synthetic oligonucleotide"
  source 1..21: mol_type = other RNA
aggcatatctggaagccattt

SEQ ID NO: 861 - RNA, 22 nt, synthetic construct
  modified_base 1: mod_base = OTHER; note = Inverted abasic nucleotide
  misc_feature 1..22: note = source = /note="Description of Artificial Sequence: Synthetic oligonucleotide"
  source 1..22: mol_type = other RNA
nacatggcttccagatatgcct

SEQ ID NO: 862 - RNA, 23 nt, synthetic construct
  misc_feature 1..23: note = source = /note="Description of Artificial Sequence: Synthetic oligonucleotide"
  source 1..23: mol_type = other RNA
aggcatatctggaagccatgttt

SEQ ID NO: 863 - RNA, 22 nt, synthetic construct
  modified_base 1: mod_base = OTHER; note = Inverted abasic nucleotide
  misc_feature 1..22: note = source = /note="Description of Artificial Sequence: Synthetic oligonucleotide"
  source 1..22: mol_type = other RNA
nacatggcttccagatatgcct

SEQ ID NO: 864 - RNA, 23 nt, synthetic construct
  misc_feature 1..23: note = source = /note="Description of Artificial Sequence: Synthetic oligonucleotide"
  source 1..23: mol_type = other RNA
aggcatatctggaagccatgttt

SEQ ID NO: 865 - RNA, 22 nt, synthetic construct
  modified_base 1: mod_base = OTHER; note = Inverted abasic nucleotide
  misc_feature 1..22: note = source = /note="Description of Artificial Sequence: Synthetic oligonucleotide"
  source 1..22: mol_type = other RNA
ncaacgtacccttcattgatgt

SEQ ID NO: 866 - RNA, 23 nt, synthetic construct
  misc_feature 1..23: note = source = /note="Description of Artificial Sequence: Synthetic oligonucleotide"
  source 1..23: mol_type = other RNA
acatcaatgaagggtacgttgtt

SEQ ID NO: 867 - RNA, 22 nt, synthetic construct
  modified_base 1: mod_base = OTHER; note = Inverted abasic nucleotide
  misc_feature 1..22: note = source = /note="Description of Artificial Sequence: Synthetic oligonucleotide"
  source 1..22: mol_type = other RNA
ncaacgtacccttcattgatgt

SEQ ID NO: 868 - RNA, 23 nt, synthetic construct
  misc_feature 1..23: note = source = /note="Description of Artificial Sequence: Synthetic oligonucleotide"
  source 1..23: mol_type = other RNA
acatcaatgaagggtacgttgtt

SEQ ID NO: 869 - RNA, 22 nt, synthetic construct
  modified_base 1: mod_base = OTHER; note = Inverted abasic nucleotide
  misc_feature 1..22: note = source = /note="Description of Artificial Sequence: Synthetic oligonucleotide"
  source 1..22: mol_type = other RNA
nacgtacccttcattgatgttt

SEQ ID NO: 870 - RNA, 21 nt, synthetic construct
  misc_feature 1..21: note = source = /note="Description of Artificial Sequence: Synthetic oligonucleotide"
  source 1..21: mol_type = other RNA
acatcaatgaagggtacgttt

SEQ ID NO: 871 - RNA, 21 nt, synthetic construct
  modified_base 21: mod_base = OTHER; note = Inverted abasic nucleotide
  misc_feature 1..21: note = source = /note="Description of Artificial Sequence: Synthetic oligonucleotide"
  source 1..21: mol_type = other RNA
ctgcttcatgcctttctacan

SEQ ID NO: 872 - RNA, 23 nt, synthetic construct
  misc_feature 1..23: note = source = /note="Description of Artificial Sequence: Synthetic oligonucleotide"
  source 1..23: mol_type = other RNA
atgtagaaaggcatgaagcagtt

SEQ ID NO: 873 - RNA, 22 nt, synthetic construct
  modified_base 1: mod_base = OTHER; note = Inverted abasic nucleotide
  misc_feature 1..22: note = source = /note="Description of Artificial Sequence: Synthetic oligonucleotide"
  source 1..22: mol_type = other RNA
nctgcttcatgcctttctacat

SEQ ID NO: 874 - RNA, 23 nt, synthetic construct
  misc_feature 1..23: note = source = /note="Description of Artificial Sequence: Synthetic oligonucleotide"
  source 1..23: mol_type = other RNA
atgtagaaaggcatgaagcagtt

SEQ ID NO: 875 - RNA, 22 nt, synthetic construct
  modified_base 1: mod_base = OTHER; note = Inverted abasic nucleotide
  misc_feature 1..22: note = source = /note="Description of Artificial Sequence: Synthetic oligonucleotide"
  source 1..22: mol_type = other RNA
ngcttcatgcctttctacattt

SEQ ID NO: 876 - RNA, 21 nt, synthetic construct
  misc_feature 1..21: note = source = /note="Description of Artificial Sequence: Synthetic oligonucleotide"
  source 1..21: mol_type = other RNA
atgtagaaaggcatgaagctt

SEQ ID NO: 877 - RNA, 21 nt, synthetic construct
  modified_base 21: mod_base = OTHER; note = Inverted abasic nucleotide
  misc_feature 1..21: note = source = /note="Description of Artificial Sequence: Synthetic oligonucleotide"
  source 1..21: mol_type = other RNA
ctgcttcatgcctttctacan

SEQ ID NO: 878 - RNA, 23 nt, synthetic construct
  misc_feature 1..23: note = source = /note="Description of Artificial Sequence: Synthetic oligonucleotide"
  source 1..23: mol_type = other RNA
atgtagaaaggcatgaagcagtt

SEQ ID NO: 879 - RNA, 22 nt, synthetic construct
  modified_base 1: mod_base = OTHER; note = Inverted abasic nucleotide
  misc_feature 1..22: note = source = /note="Description of Artificial Sequence: Synthetic oligonucleotide"
  source 1..22: mol_type = other RNA
nctgcttcatgcctttctacat

SEQ ID NO: 880 - RNA, 23 nt, synthetic construct
  misc_feature 1..23: note = source = /note="Description of Artificial Sequence: Synthetic oligonucleotide"
  source 1..23: mol_type = other RNA
atgtagaaaggcatgaagcagtt

SEQ ID NO: 881 - RNA, 21 nt, synthetic construct
  modified_base 21: mod_base = OTHER; note = Inverted abasic nucleotide
  misc_feature 1..21: note = source = /note="Description of Artificial Sequence: Synthetic oligonucleotide"
  source 1..21: mol_type = other RNA
ctgcttcatgcctttctacan

SEQ ID NO: 882 - RNA, 23 nt, synthetic construct
  misc_feature 1..23: note = source = /note="Description of Artificial Sequence: Synthetic oligonucleotide"
  source 1..23: mol_type = other RNA
atgtagaaaggcatgaagcagtt

SEQ ID NO: 883 - RNA, 22 nt, synthetic construct
  modified_base 1: mod_base = OTHER; note = Inverted abasic nucleotide
  modified_base 22: mod_base = OTHER; note = Inverted abasic nucleotide
  misc_feature 1..22: note = source = /note="Description of Artificial Sequence: Synthetic oligonucleotide"
  source 1..22: mol_type = other RNA
nctgcttcatgcctttctacan

SEQ ID NO: 884 - RNA, 23 nt, synthetic construct
  misc_feature 1..23: note = source = /note="Description of Artificial Sequence: Synthetic oligonucleotide"
  source 1..23: mol_type = other RNA
atgtagaaaggcatgaagcagtt

SEQ ID NO: 885 - RNA, 22 nt, synthetic construct
  modified_base 1: mod_base = OTHER; note = Inverted abasic nucleotide
  misc_feature 1..22: note = source = /note="Description of Artificial Sequence: Synthetic oligonucleotide"
  source 1..22: mol_type = other RNA
ngcttcatgcctttctacattt

SEQ ID NO: 886 - RNA, 21 nt, synthetic construct
  misc_feature 1..21: note = source = /note="Description of Artificial Sequence: Synthetic oligonucleotide"
  source 1..21: mol_type = other RNA
atgtagaaaggcatgaagctt

SEQ ID NO: 887 - RNA, 22 nt, synthetic construct
  modified_base 1: mod_base = OTHER; note = Inverted abasic nucleotide
  misc_feature 1..22: note = source = /note="Description of Artificial Sequence: Synthetic oligonucleotide"
  source 1..22: mol_type = other RNA
ncttcatgcctttctacagttt

SEQ ID NO: 888 - RNA, 21 nt, synthetic construct
  misc_feature 1..21: note = source = /note="Description of Artificial Sequence: Synthetic oligonucleotide"
  source 1..21: mol_type = other RNA
actgtagaaaggcatgaagtt

SEQ ID NO: 889 - RNA, 21 nt, synthetic construct
  modified_base 21: mod_base = OTHER; note = Inverted abasic nucleotide
  misc_feature 1..21: note = source = /note="Description of Artificial Sequence: Synthetic oligonucleotide"
  source 1..21: mol_type = other RNA
tgcttcatgcctttctacagn

SEQ ID NO: 890 - RNA, 23 nt, synthetic construct
  misc_feature 1..23: note = source = /note="Description of Artificial Sequence: Synthetic oligonucleotide"
  source 1..23: mol_type = other RNA
actgtagaaaggcatgaagcatt

SEQ ID NO: 891 - RNA, 22 nt, synthetic construct
  modified_base 1: mod_base = OTHER; note = Inverted abasic nucleotide
  misc_feature 1..22: note = source = /note="Description of Artificial Sequence: Synthetic oligonucleotide"
  source 1..22: mol_type = other RNA
nctgcttcatgcctttctacat

SEQ ID NO: 892 - RNA, 23 nt, synthetic construct
  misc_feature 1..23: note = source = /note="Description of Artificial Sequence: Synthetic oligonucleotide"
  source 1..23: mol_type = other RNA
atgtagaaaggcatgaagcagtt

SEQ ID NO: 893 - RNA, 21 nt, synthetic construct
  modified_base 21: mod_base = OTHER; note = Inverted abasic nucleotide
  misc_feature 1..21: note = source = /note="Description of Artificial Sequence: Synthetic oligonucleotide"
  source 1..21: mol_type = other RNA
ctgcttcatgcctttctacan

SEQ ID NO: 894 - RNA, 23 nt, synthetic construct
  misc_feature 1..23: note = source = /note="Description of Artificial Sequence: Synthetic oligonucleotide"
  source 1..23: mol_type = other RNA
atgtagaaaggcatgaagcagtt

SEQ ID NO: 895 - RNA, 21 nt, synthetic construct
  modified_base 21: mod_base = OTHER; note = Inverted abasic nucleotide
  misc_feature 1..21: note = source = /note="Description of Artificial Sequence: Synthetic oligonucleotide"
  source 1..21: mol_type = other RNA
ctgcttcatgcctttctacan

SEQ ID NO: 896 - RNA, 23 nt, synthetic construct
  misc_feature 1..23: note = source = /note="Description of Artificial Sequence: Synthetic oligonucleotide"
  source 1..23: mol_type = other RNA
atgtagaaaggcatgaagcagtt

SEQ ID NO: 897 - RNA, 22 nt, synthetic construct
  modified_base 1: mod_base = OTHER; note = Inverted abasic nucleotide
  misc_feature 1..22: note = source = /note="Description of Artificial Sequence: Synthetic oligonucleotide"
  source 1..22: mol_type = other RNA
ncttcatccctttctacagttt

SEQ ID NO: 898 - RNA, 21 nt, synthetic construct
  misc_feature 1..21: note = source = /note="Description of Artificial Sequence: Synthetic oligonucleotide"
  source 1..21: mol_type = other RNA
actgtagaaagggatgaagtt

SEQ ID NO: 899 - RNA, 22 nt, synthetic construct
  modified_base 1: mod_base = OTHER; note = Inverted abasic nucleotide
  misc_feature 1..22: note = source = /note="Description of Artificial Sequence: Synthetic oligonucleotide"
  source 1..22: mol_type = other RNA
ngcttcatccctttctacattt

SEQ ID NO: 900 - RNA, 21 nt, synthetic construct
  misc_feature 1..21: note = source = /note="Description of Artificial Sequence: Synthetic oligonucleotide"
  source 1..21: mol_type = other RNA
atgtagaaagggatgaagctt

SEQ ID NO: 901 - RNA, 21 nt, synthetic construct
  modified_base 21: mod_base = OTHER; note = Inverted abasic nucleotide
  misc_feature 1..21: note = source = /note="Description of Artificial Sequence: Synthetic oligonucleotide"
  source 1..21: mol_type = other RNA
tgcttcatccctttctacagn

SEQ ID NO: 902 - RNA, 23 nt, synthetic construct
  misc_feature 1..23: note = source = /note="Description of Artificial Sequence: Synthetic oligonucleotide"
  source 1..23: mol_type = other RNA
actgtagaaagggatgaagcatt

SEQ ID NO: 903 - RNA, 21 nt, synthetic construct
  modified_base 21: mod_base = OTHER; note = Inverted abasic nucleotide
  misc_feature 1..21: note = source = /note="Description of Artificial Sequence: Synthetic oligonucleotide"
  source 1..21: mol_type = other RNA
ctgcttcatccctttctacan

SEQ ID NO: 904 - RNA, 23 nt, synthetic construct
  misc_feature 1..23: note = source = /note="Description of Artificial Sequence: Synthetic oligonucleotide"
  source 1..23: mol_type = other RNA
atgtagaaagggatgaagcagtt

SEQ ID NO: 905 - RNA, 22 nt, synthetic construct
  modified_base 1: mod_base = OTHER; note = Inverted abasic nucleotide
  misc_feature 1..22: note = source = /note="Description of Artificial Sequence: Synthetic oligonucleotide"
  source 1..22: mol_type = other RNA
nacattgctctttcacctgatt

SEQ ID NO: 906 - RNA, 21 nt, synthetic construct
  misc_feature 1..21: note = source = /note="Description of Artificial Sequence: Synthetic oligonucleotide"
  source 1..21: mol_type = other RNA
tcaggtgaaagagcaatgttt

SEQ ID NO: 907 - RNA, 21 nt, synthetic construct
  modified_base 21: mod_base = OTHER; note = Inverted abasic nucleotide
  misc_feature 1..21: note = source = /note="Description of Artificial Sequence: Synthetic oligonucleotide"
  source 1..21: mol_type = other RNA
ctgcttcatgcctttctacan

SEQ ID NO: 908 - RNA, 23 nt, synthetic construct
  misc_feature 1..23: note = source = /note="Description of Artificial Sequence: Synthetic oligonucleotide"
  source 1..23: mol_type = other RNA
atgtagaaaggcatgaagcagtt

SEQ ID NO: 909 - RNA, 21 nt, synthetic construct
  modified_base 21: mod_base = OTHER; note = Inverted abasic nucleotide
  misc_feature 1..21: note = source = /note="Description of Artificial Sequence: Synthetic oligonucleotide"
  source 1..21: mol_type = other RNA
ctgcttcatgcctttctacan

SEQ ID NO: 910 - RNA, 23 nt, synthetic construct
  misc_feature 1..23: note = source = /note="Description of Artificial Sequence: Synthetic oligonucleotide"
  source 1..23: mol_type = other RNA
atgtagaaaggcatgaagcagtt

SEQ ID NO: 911 - RNA, 21 nt, synthetic construct
  modified_base 21: mod_base = OTHER; note = Inverted abasic nucleotide
  misc_feature 1..21: note = source = /note="Description of Artificial Sequence: Synthetic oligonucleotide"
  source 1..21: mol_type = other RNA
ctgcttcatgcctttctacan

SEQ ID NO: 912 - RNA, 23 nt, synthetic construct
  misc_feature 1..23: note = source = /note="Description of Artificial Sequence: Synthetic oligonucleotide"
  source 1..23: mol_type = other RNA
atgtagaaaggcatgaagcagtt

SEQ ID NO: 913 - RNA, 21 nt, synthetic construct
  modified_base 21: mod_base = OTHER; note = Inverted abasic nucleotide
  misc_feature 1..21: note = source = /note="Description of Artificial Sequence: Synthetic oligonucleotide"
  source 1..21: mol_type = other RNA
ctgcttcatgcctttctacan

SEQ ID NO: 914 - RNA, 23 nt, synthetic construct
  misc_feature 1..23: note = source = /note="Description of Artificial Sequence: Synthetic oligonucleotide"
  source 1..23: mol_type = other RNA
atgtagaaaggcatgaagcagtt

SEQ ID NO: 915 - RNA, 21 nt, synthetic construct
  modified_base 21: mod_base = OTHER; note = Inverted abasic nucleotide
  misc_feature 1..21: note = source = /note="Description of Artificial Sequence: Synthetic oligonucleotide"
  source 1..21: mol_type = other RNA
ctgcttcatgcctttctacan

SEQ ID NO: 916 - RNA, 23 nt, synthetic construct
  misc_feature 1..23: note = source = /note="Description of Artificial Sequence: Synthetic oligonucleotide"
  source 1..23: mol_type = other RNA
atgtagaaaggcatgaagcagtt

SEQ ID NO: 917 - RNA, 21 nt, synthetic construct
  modified_base 21: mod_base = OTHER; note = Inverted abasic nucleotide
  misc_feature 1..21: note = source = /note="Description of Artificial Sequence: Synthetic oligonucleotide"
  source 1..21: mol_type = other RNA
ctgcttcatgcctttctacan

SEQ ID NO: 918 - RNA, 23 nt, synthetic construct
  misc_feature 1..23: note = source = /note="Description of Artificial Sequence: Synthetic oligonucleotide"
  source 1..23: mol_type = other RNA
atgtagaaaggcatgaagcagtt

SEQ ID NO: 919 - RNA, 21 nt, synthetic construct
  modified_base 21: mod_base = OTHER; note = Inverted abasic nucleotide
  misc_feature 1..21: note = source = /note="Description of Artificial Sequence: Synthetic oligonucleotide"
  source 1..21: mol_type = other RNA
ctgcttcatgcctttctacan

SEQ ID NO: 920 - RNA, 23 nt, synthetic construct
  misc_feature 1..23: note = source = /note="Description of Artificial Sequence: Synthetic oligonucleotide"
  source 1..23: mol_type = other RNA
atgtagaaaggcatgaagcagtt

SEQ ID NO: 921 - RNA, 21 nt, synthetic construct
  modified_base 21: mod_base = OTHER; note = Inverted abasic nucleotide
  misc_feature 1..21: note = source = /note="Description of Artificial Sequence: Synthetic oligonucleotide"
  source 1..21: mol_type = other RNA
ctgcttcatgcctttctacan

SEQ ID NO: 922 - RNA, 23 nt, synthetic construct
  misc_feature 1..23: note = source = /note="Description of Artificial Sequence: Synthetic oligonucleotide"
  source 1..23: mol_type = other RNA
atgtagaaaggcatgaagcagtt

SEQ ID NO: 923 - RNA, 21 nt, synthetic construct
  modified_base 21: mod_base = OTHER; note = Inverted abasic nucleotide
  misc_feature 1..21: note = source = /note="Description of Artificial Sequence: Synthetic oligonucleotide"
  source 1..21: mol_type = other RNA
ctgcttcatgcctttctacan

SEQ ID NO: 924 - RNA, 23 nt, synthetic construct
  misc_feature 1..23: note = source = /note="Description of Artificial Sequence: Synthetic oligonucleotide"
  source 1..23: mol_type = other RNA
atgtagaaaggcatgaagcagtt

SEQ ID NO: 925 - RNA, 21 nt, synthetic construct
  modified_base 21: mod_base = OTHER; note = Inverted abasic nucleotide
  misc_feature 1..21: note = source = /note="Description of Artificial Sequence: Synthetic oligonucleotide"
  source 1..21: mol_type = other RNA
ctgcttcatgcctttctacan

SEQ ID NO: 926 - RNA, 23 nt, synthetic construct
  misc_feature 1..23: note = source = /note="Description of Artificial Sequence: Synthetic oligonucleotide"
  source 1..23: mol_type = other RNA
atgtagaaaggcatgaagcagtt

SEQ ID NO: 927 - RNA, 21 nt, synthetic construct
  modified_base 21: mod_base = OTHER; note = Inverted abasic nucleotide
  misc_feature 1..21: note = source = /note="Description of Artificial Sequence: Synthetic oligonucleotide"
  source 1..21: mol_type = other RNA
ctgcttcatgcctttctacan

SEQ ID NO: 928 - RNA, 23 nt, synthetic construct
  misc_feature 1..23: note = source = /note="Description of Artificial Sequence: Synthetic oligonucleotide"
  source 1..23: mol_type = other RNA
atgtagaaaggcatgaagcagtt

SEQ ID NO: 929 - DNA, 22 bp, synthetic construct
  modified_base 1: mod_base = OTHER; note = Inverted abasic nucleotide
  misc_feature 1..22: note = source = /note="Description of Artificial Sequence: Synthetic oligonucleotide"
  misc_feature 1..22: note = source = /note="Description of Combined DNA/RNA Molecule: Synthetic oligonucleotide"
  source 1..22: mol_type = other DNA
ncttcatgcctttctacagttt

SEQ ID NO: 930 - RNA, 21 nt, synthetic construct
  misc_feature 1..21: note = source = /note="Description of Artificial Sequence: Synthetic oligonucleotide"
  source 1..21: mol_type = other RNA
actgtagaaaggcatgaagtt

SEQ ID NO: 931 - RNA, 22 nt, synthetic construct
  modified_base 1: mod_base = OTHER; note = Inverted abasic nucleotide
  misc_feature 1..22: note = source = /note="Description of Artificial Sequence: Synthetic oligonucleotide"
  source 1..22: mol_type = other RNA
ncttcatgcctttctacagttt

SEQ ID NO: 932 - RNA, 21 nt, synthetic construct
  misc_feature 1..21: note = source = /note="Description of Artificial Sequence: Synthetic oligonucleotide"
  source 1..21: mol_type = other RNA
actgtagaaaggcatgaagtt

SEQ ID NO: 933 - RNA, 22 nt, synthetic construct
  modified_base 1: mod_base = OTHER; note = Inverted abasic nucleotide
  misc_feature 1..22: note = source = /note="Description of Artificial Sequence: Synthetic oligonucleotide"
  source 1..22: mol_type = other RNA
ncttcatgcctttctacagttt

SEQ ID NO: 934 - RNA, 21 nt, synthetic construct
  misc_feature 1..21: note = source = /note="Description of Artificial Sequence: Synthetic oligonucleotide"
  source 1..21: mol_type = other RNA
actgtagaaaggcatgaagtt

SEQ ID NO: 935 - RNA, 22 nt, synthetic construct
  modified_base 1: mod_base = OTHER; note = Inverted abasic nucleotide
  misc_feature 1..22: note = source = /note="Description of Artificial Sequence: Synthetic oligonucleotide"
  source 1..22: mol_type = other RNA
ncttcatgcctttctacagttt

SEQ ID NO: 936 - RNA, 21 nt, synthetic construct
  misc_feature 1..21: note = source = /note="Description of Artificial Sequence: Synthetic oligonucleotide"
  source 1..21: mol_type = other RNA
actgtagaaaggcatgaagtt

SEQ ID NO: 937 - RNA, 22 nt, synthetic construct
  modified_base 1: mod_base = OTHER; note = Inverted abasic nucleotide
  misc_feature 1..22: note = source = /note="Description of Artificial Sequence: Synthetic oligonucleotide"
  source 1..22: mol_type = other RNA
ncttcatgcctttctacagttt

SEQ ID NO: 938 - RNA, 21 nt, synthetic construct
  misc_feature 1..21: note = source = /note="Description of Artificial Sequence: Synthetic oligonucleotide"
  source 1..21: mol_type = other RNA
actgtagaaaggcatgaagtt

SEQ ID NO: 939 - DNA, 22 bp, synthetic construct
  modified_base 1: mod_base = OTHER; note = Inverted abasic nucleotide
  misc_feature 1..22: note = source = /note="Description of Artificial Sequence: Synthetic oligonucleotide"
  misc_feature 1..22: note = source = /note="Description of Combined DNA/RNA Molecule: Synthetic oligonucleotide"
  source 1..22: mol_type = other DNA
ncttcatgcctttctacagttt

SEQ ID NO: 940 - RNA, 21 nt, synthetic construct
  misc_feature 1..21: note = source = /note="Description of Artificial Sequence: Synthetic oligonucleotide"
  source 1..21: mol_type = other RNA
actgtagaaaggcatgaagtt

SEQ ID NO: 941 - DNA, 22 bp, synthetic construct
  modified_base 1: mod_base = OTHER; note = Inverted abasic nucleotide
  misc_feature 1..22: note = source = /note="Description of Artificial Sequence: Synthetic oligonucleotide"
  misc_feature 1..22: note = source = /note="Description of Combined DNA/RNA Molecule: Synthetic oligonucleotide"
  source 1..22: mol_type = other DNA
ncttcatgcctttctacagttt

SEQ ID NO: 942 - RNA, 21 nt, synthetic construct
  misc_feature 1..21: note = source = /note="Description of Artificial Sequence: Synthetic oligonucleotide"
  source 1..21: mol_type = other RNA
actgtagaaaggcatgaagtt

SEQ ID NO: 943 - RNA, 22 nt, synthetic construct
  modified_base 1: mod_base = OTHER; note = Inverted abasic nucleotide
  misc_feature 1..22: note = source = /note="Description of Artificial Sequence: Synthetic oligonucleotide"
  source 1..22: mol_type = other RNA
ngcttcatgggattctacattt

SEQ ID NO: 944 - RNA, 21 nt, synthetic construct
  misc_feature 1..21: note = source = /note="Description of Artificial Sequence: Synthetic oligonucleotide"
  source 1..21: mol_type = other RNA
atgtagaatcccatgaagctt

SEQ ID NO: 945 - RNA, 22 nt, synthetic construct
  modified_base 1: mod_base = OTHER; note = Inverted abasic nucleotide
  misc_feature 1..22: note = source = /note="Description of Artificial Sequence: Synthetic oligonucleotide"
  source 1..22: mol_type = other RNA
ncttcatgcgaatctacagttt

SEQ ID NO: 946 - RNA, 21 nt, synthetic construct
  misc_feature 1..21: note = source = /note="Description of Artificial Sequence: Synthetic oligonucleotide"
  source 1..21: mol_type = other RNA
actgtagattcgcatgaagtt

SEQ ID NO: 947 - RNA, 21 nt, synthetic construct
  modified_base 21: mod_base = OTHER; note = Inverted abasic nucleotide
  misc_feature 1..21: note = source = /note="Description of Artificial Sequence: Synthetic oligonucleotide"
  source 1..21: mol_type = other RNA
ctgcttcatgcctttctacan

SEQ ID NO: 948 - RNA, 23 nt, synthetic construct
  misc_feature 1..23: note = source = /note="Description of Artificial Sequence: Synthetic oligonucleotide"
  source 1..23: mol_type = other RNA
ttgtagaaaggcatgaagcagtt

SEQ ID NO: 949 - RNA, 22 nt, synthetic construct
  modified_base 1: mod_base = OTHER; note = Inverted abasic nucleotide
  misc_feature 1..22: note = source = /note="Description of Artificial Sequence: Synthetic oligonucleotide"
  source 1..22: mol_type = other RNA
nctgcttcatgcctttctacaa

SEQ ID NO: 950 - RNA, 23 nt, synthetic construct
  misc_feature 1..23: note = source = /note="Description of Artificial Sequence: Synthetic oligonucleotide"
  source 1..23: mol_type = other RNA
ttgtagaaaggcatgaagcagtt

SEQ ID NO: 951 - DNA, 21 bp, synthetic construct
  misc_feature 1..21: note = source = /note="Description of Artificial Sequence: Synthetic oligonucleotide"
  misc_feature 1..21: note = source = /note="Description of Combined DNA/RNA Molecule: Synthetic oligonucleotide"
  source 1..21: mol_type = other DNA
ctgcttcatgcctttctacaa

SEQ ID NO: 952 - RNA, 23 nt, synthetic construct
  misc_feature 1..23: note = source = /note="Description of Artificial Sequence: Synthetic oligonucleotide"
  source 1..23: mol_type = other RNA
ttgtagaaaggcatgaagcagtt

SEQ ID NO: 953 - RNA, 21 nt, synthetic construct
  modified_base 21: mod_base = OTHER; note = Inverted abasic nucleotide
  misc_feature 1..21: note = source = /note="Description of Artificial Sequence: Synthetic oligonucleotide"
  source 1..21: mol_type = other RNA
ctgcttcatgggattctacan

SEQ ID NO: 954 - RNA, 23 nt, synthetic construct
  misc_feature 1..23: note = source = /note="Description of Artificial Sequence: Synthetic oligonucleotide"
  source 1..23: mol_type = other RNA
atgtagaatcccatgaagcagtt

SEQ ID NO: 955 - RNA, 22 nt, synthetic construct
  modified_base 1: mod_base = OTHER; note = Inverted abasic nucleotide
  misc_feature 1..22: note = source = /note="Description of Artificial Sequence: Synthetic oligonucleotide"
  source 1..22: mol_type = other RNA
nctgcttcatgggattctacat

SEQ ID NO: 956 - RNA, 23 nt, synthetic construct
  misc_feature 1..23: note = source = /note="Description of Artificial Sequence: Synthetic oligonucleotide"
  source 1..23: mol_type = other RNA
atgtagaatcccatgaagcagtt

SEQ ID NO: 957 - RNA, 22 nt, synthetic construct
  modified_base 1: mod_base = OTHER; note = Inverted abasic nucleotide
  misc_feature 1..22: note = source = /note="Description of Artificial Sequence: Synthetic oligonucleotide"
  source 1..22: mol_type = other RNA
ncttcatgcctttctacagttt

SEQ ID NO: 958 - RNA, 21 nt, synthetic construct
  misc_feature 1..21: note = source = /note="Description of Artificial Sequence: Synthetic oligonucleotide"
  source 1..21: mol_type = other RNA
actgtagaaaggcatgaagtt

SEQ ID NO: 959 - RNA, 22 nt, synthetic construct
  modified_base 1: mod_base = OTHER; note = Inverted abasic nucleotide
  misc_feature 1..22: note = source = /note="Description of Artificial Sequence: Synthetic oligonucleotide"
  source 1..22: mol_type = other RNA
ncttcatgcctttctacagttt

SEQ ID NO: 960 - RNA, 21 nt, synthetic construct
  misc_feature 1..21: note = source = /note="Description of Artificial Sequence: Synthetic oligonucleotide"
  source 1..21: mol_type = other RNA
actgtagaaaggcatgaagtt

SEQ ID NO: 961 - RNA, 22 nt, synthetic construct
  modified_base 1: mod_base = OTHER; note = Inverted abasic nucleotide
  misc_feature 1..22: note = source = /note="Description of Artificial Sequence: Synthetic oligonucleotide"
  source 1..22: mol_type = other RNA
ngcttcatgcctttctacattt

SEQ ID NO: 962 - RNA, 21 nt, synthetic construct
  misc_feature 1..21: note = source = /note="Description of Artificial Sequence: Synthetic oligonucleotide"
  source 1..21: mol_type = other RNA
atgtagaaaggcatgaagctt

SEQ ID NO: 963 - RNA, 22 nt, synthetic construct
  modified_base 1: mod_base = OTHER; note = Inverted abasic nucleotide
  modified_base 22: mod_base = OTHER; note = Inverted abasic nucleotide
  misc_feature 1..22: note = source = /note="Description of Artificial Sequence: Synthetic oligonucleotide"
  source 1..22: mol_type = other RNA
ntgcttcatgcctttctacagn

SEQ ID NO: 964 - RNA, 23 nt, synthetic construct
  misc_feature 1..23: note = source = /note="Description of Artificial Sequence: Synthetic oligonucleotide"
  source 1..23: mol_type = other RNA
actgtagaaaggcatgaagcatt

SEQ ID NO: 965 - RNA, 22 nt, synthetic construct
  modified_base 1: mod_base = OTHER; note = Inverted abasic nucleotide
  misc_feature 1..22: note = source = /note="Description of Artificial Sequence: Synthetic oligonucleotide"
  source 1..22: mol_type = other RNA
ncttcatgcctttctacagttt

SEQ ID NO: 966 - RNA, 21 nt, synthetic construct
  misc_feature 1..21: note = source = /note="Description of Artificial Sequence: Synthetic oligonucleotide"
  source 1..21: mol_type = other RNA
actgtagaaaggcatgaagtt

SEQ ID NO: 967 - RNA, 21 nt, synthetic construct
  modified_base 21: mod_base = OTHER; note = Inverted abasic nucleotide
  misc_feature 1..21: note = source = /note="Description of Artificial Sequence: Synthetic oligonucleotide"
  source 1..21: mol_type = other RNA
tgcttcatgcctttctacagn

SEQ ID NO: 968 - RNA, 23 nt, synthetic construct
  misc_feature 1..23: note = source = /note="Description of Artificial Sequence: Synthetic oligonucleotide"
  source 1..23: mol_type = other RNA
actgtagaaaggcatgaagcatt

SEQ ID NO: 969 - RNA, 21 nt, synthetic construct
  modified_base 21: mod_base = OTHER; note = Inverted abasic nucleotide
  misc_feature 1..21: note = source = /note="Description of Artificial Sequence: Synthetic oligonucleotide"
  source 1..21: mol_type = other RNA
tgcttcatgcctttctacagn

SEQ ID NO: 970 - RNA, 23 nt, synthetic construct
  misc_feature 1..23: note = source = /note="Description of Artificial Sequence: Synthetic oligonucleotide"
  source 1..23: mol_type = other RNA
actgtagaaaggcatgaagcatt

SEQ ID NO: 971 - RNA, 21 nt, synthetic construct
  modified_base 21: mod_base = OTHER; note = Inverted abasic nucleotide
  misc_feature 1..21: note = source = /note="Description of Artificial Sequence: Synthetic oligonucleotide"
  source 1..21: mol_type = other RNA
tgcttcatgcctttctacagn

SEQ ID NO: 972 - RNA, 23 nt, synthetic construct
  misc_feature 1..23: note = source = /note="Description of Artificial Sequence: Synthetic oligonucleotide"
  source 1..23: mol_type = other RNA
actgtagaaaggcatgaagcatt

SEQ ID NO: 973 - RNA, 22 nt, synthetic construct
  modified_base 1: mod_base = OTHER; note = Inverted abasic nucleotide
  misc_feature 1..22: note = source = /note="Description of Artificial Sequence: Synthetic oligonucleotide"
  source 1..22: mol_type = other RNA
ncttcatgcctttctacagttt

SEQ ID NO: 974 - RNA, 21 nt, synthetic construct
  misc_feature 1..21: note = source = /note="Description of Artificial Sequence: Synthetic oligonucleotide"
  source 1..21: mol_type = other RNA
actgtagaaaggcatgaagtt

SEQ ID NO: 975 - RNA, 21 nt, synthetic construct
  modified_base 21: mod_base = OTHER; note = Inverted abasic nucleotide
  misc_feature 1..21: note = source = /note="Description of Artificial Sequence: Synthetic oligonucleotide"
  source 1..21: mol_type = other RNA
tgcttcatgcctttctacagn

SEQ ID NO: 976 - RNA, 23 nt, synthetic construct
  misc_feature 1..23: note = source = /note="Description of Artificial Sequence: Synthetic oligonucleotide"
  source 1..23: mol_type = other RNA
actgtagaaaggcatgaagcatt

SEQ ID NO: 977 - RNA, 21 nt, synthetic construct
  modified_base 21: mod_base = OTHER; note = Inverted abasic nucleotide
  misc_feature 1..21: note = source = /note="Description of Artificial Sequence: Synthetic oligonucleotide"
  source 1..21: mol_type = other RNA
atgcctttctacagtggcttn

SEQ ID NO: 978 - RNA, 23 nt, synthetic construct
  misc_feature 1..23: note = source = /note="Description of Artificial Sequence: Synthetic oligonucleotide"
  source 1..23: mol_type = other RNA
agccactgtagaaaggcatgatt

SEQ ID NO: 979 - RNA, 21 nt, synthetic construct
  modified_base 21: mod_base = OTHER; note = Inverted abasic nucleotide
  misc_feature 1..21: note = source = /note="Description of Artificial Sequence: Synthetic oligonucleotide"
  source 1..21: mol_type = other RNA
tcatgcctttctacagtggcn

SEQ ID NO: 980 - RNA, 23 nt, synthetic construct
  misc_feature 1..23: note = source = /note="Description of Artificial Sequence: Synthetic oligonucleotide"
  source 1..23: mol_type = other RNA
agccactgtagaaaggcatgatt

SEQ ID NO: 981 - RNA, 22 nt, synthetic construct
  modified_base 1: mod_base = OTHER; note = Inverted abasic nucleotide
  misc_feature 1..22: note = source = /note="Description of Artificial Sequence: Synthetic oligonucleotide"
  source 1..22: mol_type = other RNA
natgcctttctacagtggcttt

SEQ ID NO: 982 - RNA, 21 nt, synthetic construct
  misc_feature 1..21: note = source = /note="Description of Artificial Sequence: Synthetic oligonucleotide"
  source 1..21: mol_type = other RNA
agccactgtagaaaggcattt

SEQ ID NO: 983 - RNA, 22 nt, synthetic construct
  modified_base 1: mod_base = OTHER; note = Inverted abasic nucleotide
  misc_feature 1..22: note = source = /note="Description of Artificial Sequence: Synthetic oligonucleotide"
  source 1..22: mol_type = other RNA
natgcctttctacagtggcttt

SEQ ID NO: 984 - RNA, 21 nt, synthetic construct
  misc_feature 1..21: note = source = /note="Description of Artificial Sequence: Synthetic oligonucleotide"
  source 1..21: mol_type = other RNA
agccactgtagaaaggcattt

SEQ ID NO: 985 - RNA, 22 nt, synthetic construct
  modified_base 1: mod_base = OTHER; note = Inverted abasic nucleotide
  misc_feature 1..22: note = source = /note="Description of Artificial Sequence: Synthetic oligonucleotide"
  source 1..22: mol_type = other RNA
ntcatgcctttctacagtggct

SEQ ID NO: 986 - RNA, 23 nt, synthetic construct
  misc_feature 1..23: note = source = /note="Description of Artificial Sequence: Synthetic oligonucleotide"
  source 1..23: mol_type = other RNA
agccactgtagaaaggcatgatt

SEQ ID NO: 987 - RNA, 21 nt, synthetic construct
  modified_base 21: mod_base = OTHER; note = Inverted abasic nucleotide
  misc_feature 1..21: note = source = /note="Description of Artificial Sequence: Synthetic oligonucleotide"
  source 1..21: mol_type = other RNA
tcatgcctttctacagtggcn

SEQ ID NO: 988 - RNA, 23 nt, synthetic construct
  misc_feature 1..23: note = source = /note="Description of Artificial Sequence: Synthetic oligonucleotide"
  source 1..23: mol_type = other RNA
agccactgtagaaaggcatgatt

SEQ ID NO: 989 - RNA, 22 nt, synthetic construct
  modified_base 1: mod_base = OTHER; note = Inverted abasic nucleotide
  misc_feature 1..22: note = source = /note="Description of Artificial Sequence: Synthetic oligonucleotide"
  source 1..22: mol_type = other RNA
natgcctttctacagtggcttt

SEQ ID NO: 990 - RNA, 21 nt, synthetic construct
  misc_feature 1..21: note = source = /note="Description of Artificial Sequence: Synthetic oligonucleotide"
  source 1..21: mol_type = other RNA
agccactgtagaaaggcattt

SEQ ID NO: 991 - RNA, 21 nt, synthetic construct
  modified_base 21: mod_base = OTHER; note = Inverted abasic nucleotide
  misc_feature 1..21: note = source = /note="Description of Artificial Sequence: Synthetic oligonucleotide"
  source 1..21: mol_type = other RNA
tcatgcctttctacagtggcn

SEQ ID NO: 992 - RNA, 23 nt, synthetic construct
  misc_feature 1..23: note = source = /note="Description of Artificial Sequence: Synthetic oligonucleotide"
  source 1..23: mol_type = other RNA
agccactgtagaaaggcatgatt

SEQ ID NO: 993 - RNA, 21 nt, synthetic construct
  modified_base 21: mod_base = OTHER; note = Inverted abasic nucleotide
  misc_feature 1..21: note = source = /note="Description of Artificial Sequence: Synthetic oligonucleotide"
  source 1..21: mol_type = other RNA
tcatgcctttctacagtggcn

SEQ ID NO: 994 - RNA, 23 nt, synthetic construct
  misc_feature 1..23: note = source = /note="Description of Artificial Sequence: Synthetic oligonucleotide"
  source 1..23: mol_type = other RNA
agccactgtagaaaggcatgatt

SEQ ID NO: 995 - RNA, 22 nt, synthetic construct
  modified_base 1: mod_base = OTHER; note = Inverted abasic nucleotide
  modified_base 22: mod_base = OTHER; note = Inverted abasic nucleotide
  misc_feature 1..22: note = source = /note="Description of Artificial Sequence: Synthetic oligonucleotide"
  source 1..22: mol_type = other RNA
ntcatgcctttctacagtggcn

SEQ ID NO: 996 - RNA, 23 nt, synthetic construct
  misc_feature 1..23: note = source = /note="Description of Artificial Sequence: Synthetic oligonucleotide"
  source 1..23: mol_type = other RNA
agccactgtagaaaggcatgatt

SEQ ID NO: 997 - RNA, 22 nt, synthetic construct
  modified_base 1: mod_base = OTHER; note = Inverted abasic nucleotide
  misc_feature 1..22: note = source = /note="Description of Artificial Sequence: Synthetic oligonucleotide"
  source 1..22: mol_type = other RNA
natgcctttctacagtggcatt

SEQ ID NO: 998 - RNA, 21 nt, synthetic construct
  misc_feature 1..21: note = source = /note="Description of Artificial Sequence: Synthetic oligonucleotide"
  source 1..21: mol_type = other RNA
tgccactgtagaaaggcattt

SEQ ID NO: 999 - RNA, 21 nt, synthetic construct
  modified_base 21: mod_base = OTHER; note = Inverted abasic nucleotide
  misc_feature 1..21: note = source = /note="Description of Artificial Sequence: Synthetic oligonucleotide"
  source 1..21: mol_type = other RNA
tcatgcctttctacagtggcn

SEQ ID NO: 1000 - RNA, 23 nt, synthetic construct
  misc_feature 1..23: note = source = /note="Description of Artificial Sequence: Synthetic oligonucleotide"
  source 1..23: mol_type = other RNA
tgccactgtagaaaggcatgatt

SEQ ID NO: 1001 - RNA, 22 nt, synthetic construct
  modified_base 1: mod_base = OTHER; note = Inverted abasic nucleotide
  misc_feature 1..22: note = source = /note="Description of Artificial Sequence: Synthetic oligonucleotide"
  source 1..22: mol_type = other RNA
ntcatgcctttctacagtggca

SEQ ID NO: 1002 - RNA, 23 nt, synthetic construct
  misc_feature 1..23: note = source = /note="Description of Artificial Sequence: Synthetic oligonucleotide"
  source 1..23: mol_type = other RNA
tgccactgtagaaaggcatgatt

SEQ ID NO: 1003 - DNA, 21 bp, synthetic construct
  misc_feature 1..21: note = source = /note="Description of Artificial Sequence: Synthetic oligonucleotide"
  misc_feature 1..21: note = source = /note="Description of Combined DNA/RNA Molecule: Synthetic oligonucleotide"
  source 1..21: mol_type = other DNA
tcatgcctttctacagtggca

SEQ ID NO: 1004 - RNA, 23 nt, synthetic construct
  misc_feature 1..23: note = source = /note="Description of Artificial Sequence: Synthetic oligonucleotide"
  source 1..23: mol_type = other RNA
tgccactgtagaaaggcatgatt

SEQ ID NO: 1005 - RNA, 21 nt, synthetic construct
  modified_base 21: mod_base = OTHER; note = Inverted abasic nucleotide
  misc_feature 1..21: note = source = /note="Description of Artificial Sequence: Synthetic oligonucleotide"
  source 1..21: mol_type = other RNA
ctgcttcatgcctttctacan

SEQ ID NO: 1006 - RNA, 23 nt, synthetic construct
  misc_feature 1..23: note = source = /note="Description of Artificial Sequence: Synthetic oligonucleotide"
  source 1..23: mol_type = other RNA
atgtagaaaggcatgaagcagtt

SEQ ID NO: 1007 - RNA, 21 nt, synthetic construct
  modified_base 21: mod_base = OTHER; note = Inverted abasic nucleotide
  misc_feature 1..21: note = source = /note="Description of Artificial Sequence: Synthetic oligonucleotide"
  source 1..21: mol_type = other RNA
ctgcttcatgcctttctacan

SEQ ID NO: 1008 - RNA, 23 nt, synthetic construct
  misc_feature 1..23: note = source = /note="Description of Artificial Sequence: Synthetic oligonucleotide"
  source 1..23: mol_type = other RNA
ttgtagaaaggcatgaagcagtt

SEQ ID NO: 1009 - DNA, 21 bp, synthetic construct
  misc_feature 1..21: note = source = /note="Description of Artificial Sequence: Synthetic oligonucleotide"
  misc_feature 1..21: note = source = /note="Description of Combined DNA/RNA Molecule: Synthetic oligonucleotide"
  source 1..21: mol_type = other DNA
ctgcttcatgcctttctacaa

SEQ ID NO: 1010 - RNA, 23 nt, synthetic construct
  misc_feature 1..23: note = source = /note="Description of Artificial Sequence: Synthetic oligonucleotide"
  source 1..23: mol_type = other RNA
ttgtagaaaggcatgaagcagtt

SEQ ID NO: 1011 - RNA, 21 nt, synthetic construct
  modified_base 21: mod_base = OTHER; note = Inverted abasic nucleotide
  misc_feature 1..21: note = source = /note="Description of Artificial Sequence: Synthetic oligonucleotide"
  source 1..21: mol_type = other RNA
tcatgcctttctacagtggcn

SEQ ID NO: 1012 - RNA, 23 nt, synthetic construct
  misc_feature 1..23: note = source = /note="Description of Artificial Sequence: Synthetic oligonucleotide"
  source 1..23: mol_type = other RNA
tgccactgtagaaaggcatgatt

SEQ ID NO: 1013 - DNA, 21 bp, synthetic construct
  misc_feature 1..21: note = source = /note="Description of Artificial Sequence: Synthetic oligonucleotide"
  misc_feature 1..21: note = source = /note="Description of Combined DNA/RNA Molecule: Synthetic oligonucleotide"
  source 1..21: mol_type = other DNA
tcatgcctttctacagtggca

SEQ ID NO: 1014 - RNA, 23 nt, synthetic construct
  misc_feature 1..23: note = source = /note="Description of Artificial Sequence: Synthetic oligonucleotide"
  source 1..23: mol_type = other RNA
tgccactgtagaaaggcatgatt

SEQ ID NO: 1015 - RNA, 22 nt, synthetic construct
  modified_base 1: mod_base = OTHER; note = Inverted abasic nucleotide
  misc_feature 1..22: note = source = /note="Description of Artificial Sequence: Synthetic oligonucleotide"
  source 1..22: mol_type = other RNA
ncttcatgcctttctacagttt

SEQ ID NO: 1016 - RNA, 21 nt, synthetic construct
  misc_feature 1..21: note = source = /note="Description of Artificial Sequence: Synthetic oligonucleotide"
  source 1..21: mol_type = other RNA
actgtagaaaggcatgaagtt

SEQ ID NO: 1017 - RNA, 21 nt, synthetic construct
  modified_base 21: mod_base = OTHER; note = Inverted abasic nucleotide
  misc_feature 1..21: note = source = /note="Description of Artificial Sequence: Synthetic oligonucleotide"
  source 1..21: mol_type = other RNA
ctgcttcatgcctttctacan

SEQ ID NO: 1018 - RNA, 23 nt, synthetic construct
  modified_base 6: mod_base = OTHER; note = Abasic nucleotide
  misc_feature 1..23: note = source = /note="Description of Artificial Sequence: Synthetic oligonucleotide"
  source 1..23: mol_type = other RNA
atgtanaaaggcatgaagcagtt

SEQ ID NO: 1019 - RNA, 21 nt, synthetic construct
  modified_base 21: mod_base = OTHER; note = Inverted abasic nucleotide
  misc_feature 1..21: note = source = /note="Description of Artificial Sequence: Synthetic oligonucleotide"
  source 1..21: mol_type = other RNA
ctgcttcatgcctttctacan

SEQ ID NO: 1020 - RNA, 23 nt, synthetic construct
  modified_base 6: mod_base = OTHER; note = Abasic nucleotide
  misc_feature 1..23: note = source = /note="Description of Artificial Sequence: Synthetic oligonucleotide"
  source 1..23: mol_type = other RNA
atgtanaaaggcatgaagcagtt

SEQ ID NO: 1021 - RNA, 21 nt, synthetic construct
  modified_base 21: mod_base = OTHER; note = Inverted abasic nucleotide
  misc_feature 1..21: note = source = /note="Description of Artificial Sequence: Synthetic oligonucleotide"
  source 1..21: mol_type = other RNA
tgcttcatgcctttctacagn

SEQ ID NO: 1022 - RNA, 23 nt, synthetic construct
  modified_base 6: mod_base = OTHER; note = Abasic nucleotide
  misc_feature 1..23: note = source = /note="Description of Artificial Sequence: Synthetic oligonucleotide"
  source 1..23: mol_type = other RNA
actgtngaaaggcatgaagcatt

SEQ ID NO: 1023 - RNA, 21 nt, synthetic construct
  modified_base 21: mod_base = OTHER; note = Inverted abasic nucleotide
  misc_feature 1..21: note = source = /note="Description of Artificial Sequence: Synthetic oligonucleotide"
  source 1..21: mol_type = other RNA
tgcttcatgcctttctacagn

SEQ ID NO: 1024 - RNA, 23 nt, synthetic construct
  modified_base 6: mod_base = OTHER; note = Abasic nucleotide
  misc_feature 1..23: note = source = /note="Description of Artificial Sequence: Synthetic oligonucleotide"
  source 1..23: mol_type = other RNA
actgtngaaaggcatgaagcatt

SEQ ID NO: 1025 - RNA, 21 nt, synthetic construct
  modified_base 21: mod_base = OTHER; note = Inverted abasic nucleotide
  misc_feature 1..21: note = source = /note="Description of Artificial Sequence: Synthetic oligonucleotide"
  source 1..21: mol_type = other RNA
tcatgcctttctacagtggcn

SEQ ID NO: 1026 - RNA, 23 nt, synthetic construct
  modified_base 6: mod_base = OTHER; note = Abasic nucleotide
  misc_feature 1..23: note = source = /note="Description of Artificial Sequence: Synthetic oligonucleotide"
  source 1..23: mol_type = other RNA
agccantgtagaaaggcatgatt

SEQ ID NO: 1027 - RNA, 21 nt, synthetic construct
  modified_base 21: mod_base = OTHER; note = Inverted abasic nucleotide
  misc_feature 1..21: note = source = /note="Description of Artificial Sequence: Synthetic oligonucleotide"
  source 1..21: mol_type = other RNA
tcatgcctttctacagtggcn

SEQ ID NO: 1028 - RNA, 23 nt, synthetic construct
  modified_base 6: mod_base = OTHER; note = Abasic nucleotide
  misc_feature 1..23: note = source = /note="Description of Artificial Sequence: Synthetic oligonucleotide"
  source 1..23: mol_type = other RNA
agccantgtagaaaggcatgatt

SEQ ID NO: 1029 - RNA, 21 nt, synthetic construct
  modified_base 21: mod_base = OTHER; note = Inverted abasic nucleotide
  misc_feature 1..21: note = source = /note="Description of Artificial Sequence: Synthetic oligonucleotide"
  source 1..21: mol_type = other RNA
ctgcttcatgcctttctacan

SEQ ID NO: 1030 - RNA, 23 nt, synthetic construct
  misc_feature 1..23: note = source = /note="Description of Artificial Sequence: Synthetic oligonucleotide"
  source 1..23: mol_type = other RNA
atgtagaaaggcatgaagcagtt

SEQ ID NO: 1031 - RNA, 21 nt, synthetic construct
  modified_base 21: mod_base = OTHER; note = Inverted abasic nucleotide
  misc_feature 1..21: note = source = /note="Description of Artificial Sequence: Synthetic oligonucleotide"
  source 1..21: mol_type = other RNA
ctgcttcatgcctttctacan

SEQ ID NO: 1032 - RNA, 23 nt, synthetic construct
  misc_feature 1..23: note = source = /note="Description of Artificial Sequence: Synthetic oligonucleotide"
  source 1..23: mol_type = other RNA
atgtagaaaggcatgaagcagtt

SEQ ID NO: 1033 - RNA, 21 nt, synthetic construct
  modified_base 21: mod_base = OTHER; note = Inverted abasic nucleotide
  misc_feature 1..21: note = source = /note="Description of Artificial Sequence: Synthetic oligonucleotide"
  source 1..21: mol_type = other RNA
ctgcttcatgcctttctacan

SEQ ID NO: 1034 - RNA, 23 nt, synthetic construct
  misc_feature 1..23: note = source = /note="Description of Artificial Sequence: Synthetic oligonucleotide"
  source 1..23: mol_type = other RNA
atgtagaaaggcatgaagcagtt

SEQ ID NO: 1035 - RNA, 21 nt, synthetic construct
  modified_base 21: mod_base = OTHER; note = Inverted abasic nucleotide
  misc_feature 1..21: note = source = /note="Description of Artificial Sequence: Synthetic oligonucleotide"
  source 1..21: mol_type = other RNA
ctgcttcatgcctttctacan

SEQ ID NO: 1036 - RNA, 23 nt, synthetic construct
  misc_feature 1..23: note = source = /note="Description of Artificial Sequence: Synthetic oligonucleotide"
  source 1..23: mol_type = other RNA
atgtagaaaggcatgaagcagtt

SEQ ID NO: 1037 - RNA, 21 nt, synthetic construct
  modified_base 21: mod_base = OTHER; note = Inverted abasic nucleotide
  misc_feature 1..21: note = source = /note="Description of Artificial Sequence: Synthetic oligonucleotide"
  source 1..21: mol_type = other RNA
ctgcttcatgcctttctacan

SEQ ID NO: 1038 - RNA, 23 nt, synthetic construct
  misc_feature 1..23: note = source = /note="Description of Artificial Sequence: Synthetic oligonucleotide"
  source 1..23: mol_type = other RNA
atgtagaaaggcatgaagcagtt

SEQ ID NO: 1039 - RNA, 21 nt, synthetic construct
  modified_base 21: mod_base = OTHER; note = Inverted abasic nucleotide
  misc_feature 1..21: note = source = /note="Description of Artificial Sequence: Synthetic oligonucleotide"
  source 1..21: mol_type = other RNA
ctgcttcatgcctttctacan

SEQ ID NO: 1040 - RNA, 23 nt, synthetic construct
  misc_feature 1..23: note = source = /note="Description of Artificial Sequence: Synthetic oligonucleotide"
  source 1..23: mol_type = other RNA
atgtagaaaggcatgaagcagtt

SEQ ID NO: 1041 - RNA, 21 nt, synthetic construct
  modified_base 21: mod_base = OTHER; note = Inverted abasic nucleotide
  misc_feature 1..21: note = source = /note="Description of Artificial Sequence: Synthetic oligonucleotide"
  source 1..21: mol_type = other RNA
ctgcttcatgcctttctacan

SEQ ID NO: 1042 - RNA, 23 nt, synthetic construct
  misc_feature 1..23: note = source = /note="Description of Artificial Sequence: Synthetic oligonucleotide"
  source 1..23: mol_type = other RNA
atgtagaaaggcatgaagcagtt

SEQ ID NO: 1043 - RNA, 22 nt, synthetic construct
  modified_base 1: mod_base = OTHER; note = Inverted abasic nucleotide
  misc_feature 1..22: note = source = /note="Description of Artificial Sequence: Synthetic oligonucleotide"
  source 1..22: mol_type = other RNA
nctgcttcatgcctttctacat

SEQ ID NO: 1044 - RNA, 23 nt, synthetic construct
  misc_feature 1..23: note = source = /note="Description of Artificial Sequence: Synthetic oligonucleotide"
  source 1..23: mol_type = other RNA
atgtagaaaggcatgaagcagtt

SEQ ID NO: 1045 - RNA, 22 nt, synthetic construct
  modified_base 1: mod_base = OTHER; note = Inverted abasic nucleotide
  modified_base 22: mod_base = OTHER; note = Inverted abasic nucleotide
  misc_feature 1..22: note = source = /note="Description of Artificial Sequence: Synthetic oligonucleotide"
  source 1..22: mol_type = other RNA
nctgcttcatgcctttctacan

SEQ ID NO: 1046 - RNA, 23 nt, synthetic construct
  misc_feature 1..23: note = source = /note="Description of Artificial Sequence: Synthetic oligonucleotide"
  source 1..23: mol_type = other RNA
atgtagaaaggcatgaagcagtt

SEQ ID NO: 1047 - RNA, 21 nt, synthetic construct
  modified_base 21: mod_base = OTHER; note = Inverted abasic nucleotide
  misc_feature 1..21: note = source = /note="Description of Artificial Sequence: Synthetic oligonucleotide"
  source 1..21: mol_type = other RNA
ctgcttcatgcctttctacan

SEQ ID NO: 1048 - RNA, 23 nt, synthetic construct
  misc_feature 1..23: note = source = /note="Description of Artificial Sequence: Synthetic oligonucleotide"
  source 1..23: mol_type = other RNA
atgtagaaaggcatgaagcagtt

SEQ ID NO: 1049 - RNA, 21 nt, synthetic construct
  modified_base 21: mod_base = OTHER; note = Inverted abasic nucleotide
  misc_feature 1..21: note = source = /note="Description of Artificial Sequence: Synthetic oligonucleotide"
  source 1..21: mol_type = other RNA
ctgcttcatgcctttctacan

SEQ ID NO: 1050 - RNA, 23 nt, synthetic construct
  misc_feature 1..23: note = source = /note="Description of Artificial Sequence: Synthetic oligonucleotide"
  source 1..23: mol_type = other RNA
atgtagaaaggcatgaagcagtt

SEQ ID NO: 1051 - RNA, 22 nt, synthetic construct
  modified_base 1: mod_base = OTHER; note = Inverted abasic nucleotide
  misc_feature 1..22: note = source = /note="Description of Artificial Sequence: Synthetic oligonucleotide"
  source 1..22: mol_type = other RNA
nctgcttcatgcctttctacat

SEQ ID NO: 1052 - RNA, 23 nt, synthetic construct
  misc_feature 1..23: note = source = /note="Description of Artificial Sequence: Synthetic oligonucleotide"
  source 1..23: mol_type = other RNA
atgtagaaaggcatgaagcagtt

SEQ ID NO: 1053 - RNA, 21 nt, synthetic construct
  modified_base 21: mod_base = OTHER; note = Inverted abasic nucleotide
  misc_feature 1..21: note = source = /note="Description of Artificial Sequence: Synthetic oligonucleotide"
  source 1..21: mol_type = other RNA
ctgcttcatgcctttctacan

SEQ ID NO: 1054 - RNA, 23 nt, synthetic construct
  misc_feature 1..23: note = source = /note="Description of Artificial Sequence: Synthetic oligonucleotide"
  source 1..23: mol_type = other RNA
atgtagaaaggcatgaagcagtt

SEQ ID NO: 1055 - RNA, 21 nt, synthetic construct
  modified_base 21: mod_base = OTHER; note = Inverted abasic nucleotide
  misc_feature 1..21: note = source = /note="Description of Artificial Sequence: Synthetic oligonucleotide"
  source 1..21: mol_type = other RNA
ctgcttcatgcctttctacan

SEQ ID NO: 1056 - RNA, 23 nt, synthetic construct
  misc_feature 1..23: note = source = /note="Description of Artificial Sequence: Synthetic oligonucleotide"
  source 1..23: mol_type = other RNA
atgtagaaaggcatgaagcagtt

SEQ ID NO: 1057 - RNA, 22 nt, synthetic construct
  modified_base 1: mod_base = OTHER; note = Inverted abasic nucleotide
  misc_feature 1..22: note = source = /note="Description of Artificial Sequence: Synthetic oligonucleotide"
  source 1..22: mol_type = other RNA
nctgcttcatgcctttctacat

SEQ ID NO: 1058 - RNA, 23 nt, synthetic construct
  misc_feature 1..23: note = source = /note="Description of Artificial Sequence: Synthetic oligonucleotide"
  source 1..23: mol_type = other RNA
atgtagaaaggcatgaagcagtt

SEQ ID NO: 1059 - RNA, 22 nt, synthetic construct
  modified_base 1: mod_base = OTHER; note = Inverted abasic nucleotide
  modified_base 22: mod_base = OTHER; note = Inverted abasic nucleotide
  misc_feature 1..22: note = source = /note="Description of Artificial Sequence: Synthetic oligonucleotide"
  source 1..22: mol_type = other RNA
nctgcttcatgcctttctacan

SEQ ID NO: 1060 - RNA, 23 nt, synthetic construct
  misc_feature 1..23: note = source = /note="Description of Artificial Sequence: Synthetic oligonucleotide"
  source 1..23: mol_type = other RNA
atgtagaaaggcatgaagcagtt

SEQ ID NO: 1061 - RNA, 21 nt, synthetic construct
  modified_base 21: mod_base = OTHER; note = Inverted abasic nucleotide
  misc_feature 1..21: note = source = /note="Description of Artificial Sequence: Synthetic oligonucleotide"
  source 1..21: mol_type = other RNA
ctgcttcatgcctttctacan

SEQ ID NO: 1062 - RNA, 23 nt, synthetic construct
  modified_base 2: mod_base = OTHER; note = Abasic nucleotide
  misc_feature 1..23: note = source = /note="Description of Artificial Sequence: Synthetic oligonucleotide"
  source 1..23: mol_type = other RNA
angtagaaaggcatgaagcagtt

SEQ ID NO: 1063 - RNA, 21 nt, synthetic construct
  modified_base 21: mod_base = OTHER; note = Inverted abasic nucleotide
  misc_feature 1..21: note = source = /note="Description of Artificial Sequence: Synthetic oligonucleotide"
  source 1..21: mol_type = other RNA
ctgcttcatgcctttctacan

SEQ ID NO: 1064 - RNA, 23 nt, synthetic construct
  modified_base 3: mod_base = OTHER; note = Abasic nucleotide
  misc_feature 1..23: note = source = /note="Description of Artificial Sequence: Synthetic oligonucleotide"
  source 1..23: mol_type = other RNA
atntagaaaggcatgaagcagtt

SEQ ID NO: 1065 - RNA, 21 nt, synthetic construct
  modified_base 21: mod_base = OTHER; note = Inverted abasic nucleotide
  misc_feature 1..21: note = source = /note="Description of Artificial Sequence: Synthetic oligonucleotide"
  source 1..21: mol_type = other RNA
ctgcttcatgcctttctacan

SEQ ID NO: 1066 - RNA, 23 nt, synthetic construct
  modified_base 4: mod_base = OTHER; note = Abasic nucleotide
  misc_feature 1..23: note = source = /note="Description of Artificial Sequence: Synthetic oligonucleotide"
  source 1..23: mol_type = other RNA
atgnagaaaggcatgaagcagtt

SEQ ID NO: 1067 - RNA, 21 nt, synthetic construct
  modified_base 21: mod_base = OTHER; note = Inverted abasic nucleotide
  misc_feature 1..21: note = source = /note="Description of Artificial Sequence: Synthetic oligonucleotide"
  source 1..21: mol_type = other RNA
ctgcttcatgcctttctacan

SEQ ID NO: 1068 - RNA, 23 nt, synthetic construct
  modified_base 5: mod_base = OTHER; note = Abasic nucleotide
  misc_feature 1..23: note = source = /note="Description of Artificial Sequence: Synthetic oligonucleotide"
  source 1..23: mol_type = other RNA
atgtngaaaggcatgaagcagtt

SEQ ID NO: 1069 - RNA, 21 nt, synthetic construct
  modified_base 21: mod_base = OTHER; note = Inverted abasic nucleotide
  misc_feature 1..21: note = source = /note="Description of Artificial Sequence: Synthetic oligonucleotide"
  source 1..21: mol_type = other RNA
ctgcttcatgcctttctacan

SEQ ID NO: 1070 - RNA, 23 nt, synthetic construct
  modified_base 7: mod_base = OTHER; note = Abasic nucleotide
  misc_feature 1..23: note = source = /note="Description of Artificial Sequence: Synthetic oligonucleotide"
  source 1..23: mol_type = other RNA
atgtagnaaggcatgaagcagtt

SEQ ID NO: 1071 - RNA, 21 nt, synthetic construct
  modified_base 21: mod_base = OTHER; note = Inverted abasic nucleotide
  misc_feature 1..21: note = source = /note="Description of Artificial Sequence: Synthetic oligonucleotide"
  source 1..21: mol_type = other RNA
ctgcttcatgcctttctacan

SEQ ID NO: 1072 - RNA, 23 nt, synthetic construct
  modified_base 8: mod_base = OTHER; note = Abasic nucleotide
  misc_feature 1..23: note = source = /note="Description of Artificial Sequence: Synthetic oligonucleotide"
  source 1..23: mol_type = other RNA
atgtaganaggcatgaagcagtt

SEQ ID NO: 1073 - RNA, 21 nt, synthetic construct
  modified_base 21: mod_base = OTHER; note = Inverted abasic nucleotide
  misc_feature 1..21: note = source = /note="Description of Artificial Sequence: Synthetic oligonucleotide"
  source 1..21: mol_type = other RNA
caacgtacccttcattgatgn

SEQ ID NO: 1074 - RNA, 23 nt, synthetic construct
  misc_feature 1..23: note = source = /note="Description of Artificial Sequence: Synthetic oligonucleotide"
  source 1..23: mol_type = other RNA
acatcaatgaagggtacgttgtt

SEQ ID NO: 1075 - RNA, 21 nt, synthetic construct
  modified_base 21: mod_base = OTHER; note = Inverted abasic nucleotide
  misc_feature 1..21: note = source = /note="Description of Artificial Sequence: Synthetic oligonucleotide"
  source 1..21: mol_type = other RNA
caacgtacccttcattgatgn

SEQ ID NO: 1076 - RNA, 23 nt, synthetic construct
  misc_feature 1..23: note = source = /note="Description of Artificial Sequence: Synthetic oligonucleotide"
  source 1..23: mol_type = other RNA
acatcaatgaagggtacgttgtt

SEQ ID NO: 1077 - RNA, 21 nt, synthetic construct
  modified_base 21: mod_base = OTHER; note = Inverted abasic nucleotide
  misc_feature 1..21: note = source = /note="Description of Artificial Sequence: Synthetic oligonucleotide"
  source 1..21: mol_type = other RNA
acatggcttccagatatgccn

SEQ ID NO: 1078 - RNA, 23 nt, synthetic construct
  misc_feature 1..23: note = source = /note="Description of Artificial Sequence: Synthetic oligonucleotide"
  source 1..23: mol_type = other RNA
aggcatatctggaagccatgttt

SEQ ID NO: 1079 - RNA, 21 nt, synthetic construct
  modified_base 21: mod_base = OTHER; note = Inverted abasic nucleotide
  misc_feature 1..21: note = source = /note="Description of Artificial Sequence: Synthetic oligonucleotide"
  source 1..21: mol_type = other RNA
acatggcttccagatatgccn

SEQ ID NO: 1080 - RNA, 23 nt, synthetic construct
  misc_feature 1..23: note = source = /note="Description of Artificial Sequence: Synthetic oligonucleotide"
  source 1..23: mol_type = other RNA
aggcatatctggaagccatgttt

SEQ ID NO: 1081 - RNA, 21 nt, synthetic construct
  modified_base 21: mod_base = OTHER; note = Inverted abasic nucleotide
  misc_feature 1..21: note = source = /note="Description of Artificial Sequence: Synthetic oligonucleotide"
  source 1..21: mol_type = other RNA
ctgcttcatgcctttctacan

SEQ ID NO: 1082 - RNA, 23 nt, synthetic construct
  misc_feature 1..23: note = source = /note="Description of Artificial Sequence: Synthetic oligonucleotide"
  source 1..23: mol_type = other RNA
atgtagaaaggcatgaagcagtt

SEQ ID NO: 1083 - RNA, 21 nt, synthetic construct
  modified_base 21: mod_base = OTHER; note = Inverted abasic nucleotide
  misc_feature 1..21: note = source = /note="Description of Artificial Sequence: Synthetic oligonucleotide"
  source 1..21: mol_type = other RNA
ctgcttcatgcctttctacan

SEQ ID NO: 1084 - RNA, 23 nt, synthetic construct
  misc_feature 1..23: note = source = /note="Description of Artificial Sequence: Synthetic oligonucleotide"
  source 1..23: mol_type = other RNA
atgtagaaaggcatgaagcagtt

SEQ ID NO: 1085 - RNA, 21 nt, synthetic construct
  modified_base 21: mod_base = OTHER; note = Inverted abasic nucleotide
  misc_feature 1..21: note = source = /note="Description of Artificial Sequence: Synthetic oligonucleotide"
  source 1..21: mol_type = other RNA
ctgcttcatgcctttctacan

SEQ ID NO: 1086 - RNA, 23 nt, synthetic construct
  misc_feature 1..23: note = source = /note="Description of Artificial Sequence: Synthetic oligonucleotide"
  source 1..23: mol_type = other RNA
atgtagaaaggcatgaagcagtt

SEQ ID NO: 1087 - RNA, 21 nt, synthetic construct
  modified_base 21: mod_base = OTHER; note = Inverted abasic nucleotide
  misc_feature 1..21: note = source = /note="Description of Artificial Sequence: Synthetic oligonucleotide"
  source 1..21: mol_type = other RNA
ctgcggcttcctgggcttctn

SEQ ID NO: 1088 - RNA, 23 nt, synthetic construct
  misc_feature 1..23: note = source = /note="Description of Artificial Sequence: Synthetic oligonucleotide"
  source 1..23: mol_type = other RNA
tagaagcccaggaagccgcagtt

SEQ ID NO: 1089 - RNA, 21 nt, synthetic construct
  modified_base 21: mod_base = OTHER; note = Inverted abasic nucleotide
  misc_feature 1..21: note = source = /note="Description of Artificial Sequence: Synthetic oligonucleotide"
  source 1..21: mol_type = other RNA
ctgcggcttcctgggcttctn

SEQ ID NO: 1090 - RNA, 23 nt, synthetic construct
  misc_feature 1..23: note = source = /note="Description of Artificial Sequence: Synthetic oligonucleotide"
  source 1..23: mol_type = other RNA
tagaagcccaggaagccgcagtt

SEQ ID NO: 1091 - RNA, 21 nt, synthetic construct
  modified_base 21: mod_base = OTHER; note = Inverted abasic nucleotide
  misc_feature 1..21: note = source = /note="Description of Artificial Sequence: Synthetic oligonucleotide"
  source 1..21: mol_type = other RNA
tgcttcatgcctttctacagn

SEQ ID NO: 1092 - RNA, 23 nt, synthetic construct
  misc_feature 1..23: note = source = /note="Description of Artificial Sequence: Synthetic oligonucleotide"
  source 1..23: mol_type = other RNA
actgtagaaaggcatgaagcatt

SEQ ID NO: 1093 - RNA, 22 nt, synthetic construct
  modified_base 1: mod_base = OTHER; note = Inverted abasic nucleotide
  misc_feature 1..22: note = source = /note="Description of Artificial Sequence: Synthetic oligonucleotide"
  source 1..22: mol_type = other RNA
ntgcttcatgcctttctacagt

SEQ ID NO: 1094 - RNA, 23 nt, synthetic construct
  misc_feature 1..23: note = source = /note="Description of Artificial Sequence: Synthetic oligonucleotide"
  source 1..23: mol_type = other RNA
actgtagaaaggcatgaagcatt

SEQ ID NO: 1095 - RNA, 22 nt, synthetic construct
  modified_base 1: mod_base = OTHER; note = Inverted abasic nucleotide
  modified_base 22: mod_base = OTHER; note = Inverted abasic nucleotide
  misc_feature 1..22: note = source = /note="Description of Artificial Sequence: Synthetic oligonucleotide"
  source 1..22: mol_type = other RNA
ntgcttcatgcctttctacagn

SEQ ID NO: 1096 - RNA, 23 nt, synthetic construct
  misc_feature 1..23: note = source = /note="Description of Artificial Sequence: Synthetic oligonucleotide"
  source 1..23: mol_type = other RNA
actgtagaaaggcatgaagcatt

SEQ ID NO: 1097 - RNA, 21 nt, synthetic construct
  modified_base 21: mod_base = OTHER; note = Inverted abasic nucleotide
  misc_feature 1..21: note = source = /note="Description of Artificial Sequence: Synthetic oligonucleotide"
  source 1..21: mol_type = other RNA
tgcttcatgcctttctacagn

SEQ ID NO: 1098 - RNA, 23 nt, synthetic construct
  misc_feature 1..23: note = source = /note="Description of Artificial Sequence: Synthetic oligonucleotide"
  source 1..23: mol_type = other RNA
actgtagaaaggcatgaagcatt

SEQ ID NO: 1099 - RNA, 21 nt, synthetic construct
  modified_base 21: mod_base = OTHER; note = Inverted abasic nucleotide
  misc_feature 1..21: note = source = /note="Description of Artificial Sequence: Synthetic oligonucleotide"
  source 1..21: mol_type = other RNA
tgcttcatgcctttctacagn

SEQ ID NO: 1100 - RNA, 23 nt, synthetic construct
  misc_feature 1..23: note = source = /note="Description of Artificial Sequence: Synthetic oligonucleotide"
  source 1..23: mol_type = other RNA
actgtagaaaggcatgaagcatt

SEQ ID NO: 1101 - RNA, 21 nt, synthetic construct
  modified_base 21: mod_base = OTHER; note = Inverted abasic nucleotide
  misc_feature 1..21: note = source = /note="Description of Artificial Sequence: Synthetic oligonucleotide"
  source 1..21: mol_type = other RNA
tgcttcatgcctttctacagn

SEQ ID NO: 1102 - RNA, 23 nt, synthetic construct
  misc_feature 1..23: note = source = /note="Description of Artificial Sequence: Synthetic oligonucleotide"
  source 1..23: mol_type = other RNA
actgtagaaaggcatgaagcatt

SEQ ID NO: 1103 - RNA, 21 nt, synthetic construct
  misc_feature 1..21: note = source = /note="Description of Artificial Sequence: Synthetic oligonucleotide"
  source 1..21: mol_type = other RNA
ctgcttcatgcctttctacat

SEQ ID NO: 1104 - RNA, 23 nt, synthetic construct
  misc_feature 1..23: note = source = /note="Description of Artificial Sequence: Synthetic oligonucleotide"
  source 1..23: mol_type = other RNA
atgtagaaaggcatgaagcagtt

SEQ ID NO: 1105 - RNA, 21 nt, synthetic construct
  misc_feature 1..21: note = source = /note="Description of Artificial Sequence: Synthetic oligonucleotide"
  source 1..21: mol_type = other RNA
ctgcttcatgcctttctacat

SEQ ID NO: 1106 - RNA, 23 nt, synthetic construct
  misc_feature 1..23: note = source = /note="Description of Artificial Sequence: Synthetic oligonucleotide"
  source 1..23: mol_type = other RNA
atgtagaaaggcatgaagcagtt

SEQ ID NO: 1107 - RNA, 21 nt, synthetic construct
  misc_feature 1..21: note = source = /note="Description of Artificial Sequence: Synthetic oligonucleotide"
  source 1..21: mol_type = other RNA
ctgcttcatgcctttctacat

SEQ ID NO: 1108 - RNA, 23 nt, synthetic construct
  misc_feature 1..23: note = source = /note="Description of Artificial Sequence: Synthetic oligonucleotide"
  source 1..23: mol_type = other RNA
atgtagaaaggcatgaagcagtt

SEQ ID NO: 1109 - RNA, 21 nt, synthetic construct
  modified_base 21: mod_base = OTHER; note = Inverted abasic nucleotide
  misc_feature 1..21: note = source = /note="Description of Artificial Sequence: Synthetic oligonucleotide"
  source 1..21: mol_type = other RNA
tgcttcatgcctttctacagn

SEQ ID NO: 1110 - RNA, 23 nt, synthetic construct
  misc_feature 1..23: note = source = /note="Description of Artificial Sequence: Synthetic oligonucleotide"
  source 1..23: mol_type = other RNA
tctgtagaaaggcatgaagcatt

SEQ ID NO: 1111 - DNA, 21 bp, synthetic construct
  misc_feature 1..21: note = source = /note="Description of Artificial Sequence: Synthetic oligonucleotide"
  misc_feature 1..21: note = source = /note="Description of Combined DNA/RNA Molecule: Synthetic oligonucleotide"
  source 1..21: mol_type = other DNA
tgcttcatgcctttctacaga

SEQ ID NO: 1112 - RNA, 23 nt, synthetic construct
  misc_feature 1..23: note = source = /note="Description of Artificial Sequence: Synthetic oligonucleotide"
  source 1..23: mol_type = other RNA
tctgtagaaaggcatgaagcatt

SEQ ID NO: 1113 - DNA, 21 bp, synthetic construct
  misc_feature 1..21: note = source = /note="Description of Artificial Sequence: Synthetic oligonucleotide"
  misc_feature 1..21: note = source = /note="Description of Combined DNA/RNA Molecule: Synthetic oligonucleotide"
  source 1..21: mol_type = other DNA
ctgcttcatgcctttctacat

SEQ ID NO: 1114 - RNA, 23 nt, synthetic construct
  misc_feature 1..23: note = source = /note="Description of Artificial Sequence: Synthetic oligonucleotide"
  source 1..23: mol_type = other RNA
atgtagaaaggcatgaagcagtt

SEQ ID NO: 1115 - RNA, 21 nt, synthetic construct
  modified_base 21: mod_base = OTHER; note = Inverted abasic nucleotide
  misc_feature 1..21: note = source = /note="Description of Artificial Sequence: Synthetic oligonucleotide"
  source 1..21: mol_type = other RNA
ctgcttcatgcctttctacan

SEQ ID NO: 1116 - RNA, 23 nt, synthetic construct
  misc_feature 1..23: note = source = /note="Description of Artificial Sequence: Synthetic oligonucleotide"
  source 1..23: mol_type = other RNA
atgtagaaaggcatgaagcagtt

SEQ ID NO: 1117 - RNA, 21 nt, synthetic construct
  modified_base 21: mod_base = OTHER; note = Inverted abasic nucleotide
  misc_feature 1..21: note = source = /note="Description of Artificial Sequence: Synthetic oligonucleotide"
  source 1..21: mol_type = other RNA
ctgcttcatgcctttctacan

SEQ ID NO: 1118 - RNA, 23 nt, synthetic construct
  misc_feature 1..23: note = source = /note="Description of Artificial Sequence: Synthetic oligonucleotide"
  source 1..23: mol_type = other RNA
atgtagaaaggcatgaagcagtt

SEQ ID NO: 1119 - RNA, 21 nt, synthetic construct
  modified_base 21: mod_base = OTHER; note = Inverted abasic nucleotide
  misc_feature 1..21: note = source = /note="Description of Artificial Sequence: Synthetic oligonucleotide"
  source 1..21: mol_type = other RNA
ctgcttcatgcctttctacan

SEQ ID NO: 1120 - RNA, 23 nt, synthetic construct
  misc_feature 1..23: note = source = /note="Description of Artificial Sequence: Synthetic oligonucleotide"
  source 1..23: mol_type = other RNA
atgtagaaaggcatgaagcagtt

SEQ ID NO: 1121 - RNA, 21 nt, synthetic construct
  modified_base 21: mod_base = OTHER; note = Inverted abasic nucleotide
  misc_feature 1..21: note = source = /note="Description of Artificial Sequence: Synthetic oligonucleotide"
  source 1..21: mol_type = other RNA
ctgcttcatgcctttctacan

SEQ ID NO: 1122 - RNA, 23 nt, synthetic construct
  misc_feature 1..23: note = source = /note="Description of Artificial Sequence: Synthetic oligonucleotide"
  source 1..23: mol_type = other RNA
atgtagaaaggcatgaagcagtt

SEQ ID NO: 1123 - RNA, 21 nt, synthetic construct
  modified_base 21: mod_base = OTHER; note = Inverted abasic nucleotide
  misc_feature 1..21: note = source = /note="Description of Artificial Sequence: Synthetic oligonucleotide"
  source 1..21: mol_type = other RNA
ctgcttcatgcctttctacan

SEQ ID NO: 1124 - RNA, 23 nt, synthetic construct
  misc_feature 1..23: note = source = /note="Description of Artificial Sequence: Synthetic oligonucleotide"
  source 1..23: mol_type = other RNA
atgtagaaaggcatgaagcagtt

SEQ ID NO: 1125 - RNA, 21 nt, synthetic construct
  modified_base 21: mod_base = OTHER; note = Inverted abasic nucleotide
  misc_feature 1..21: note = source = /note="Description of Artificial Sequence: Synthetic oligonucleotide"
  source 1..21: mol_type = other RNA
ctgcttcatgcctttctacan

SEQ ID NO: 1126 - RNA, 23 nt, synthetic construct
  misc_feature 1..23: note = source = /note="Description of Artificial Sequence: Synthetic oligonucleotide"
  source 1..23: mol_type = other RNA
atgtagaaaggcatgaagcagtt

SEQ ID NO: 1127 - RNA, 21 nt, synthetic construct
  modified_base 21: mod_base = OTHER; note = Inverted abasic nucleotide
  misc_feature 1..21: note = source = /note="Description of Artificial Sequence: Synthetic oligonucleotide"
  source 1..21: mol_type = other RNA
ctgcttcatgcctttctacan

SEQ ID NO: 1128 - RNA, 23 nt, synthetic construct
  misc_feature 1..23: note = source = /note="Description of Artificial Sequence: Synthetic oligonucleotide"
  source 1..23: mol_type = other RNA
atgtagaaaggcatgaagcagtt

SEQ ID NO: 1129 - RNA, 21 nt, synthetic construct
  modified_base 21: mod_base = OTHER; note = Inverted abasic nucleotide
  misc_feature 1..21: note = source = /note="Description of Artificial Sequence: Synthetic oligonucleotide"
  source 1..21: mol_type = other RNA
ctgcttcatgcctttctacan

SEQ ID NO: 1130 - RNA, 23 nt, synthetic construct
  misc_feature 1..23: note = source = /note="Description of Artificial Sequence: Synthetic oligonucleotide"
  source 1..23: mol_type = other RNA
atgtagaaaggcatgaagcagtt

SEQ ID NO: 1131 - RNA, 21 nt, synthetic construct
  modified_base 21: mod_base = OTHER; note = Inverted abasic nucleotide
  misc_feature 1..21: note = source = /note="Description of Artificial Sequence: Synthetic oligonucleotide"
  source 1..21: mol_type = other RNA
ctgcttcatgcctttctacan

SEQ ID NO: 1132 - RNA, 23 nt, synthetic construct
  misc_feature 1..23: note = source = /note="Description of Artificial Sequence: Synthetic oligonucleotide"
  source 1..23: mol_type = other RNA
atgtagaaaggcatgaagcagtt

SEQ ID NO: 1133 - RNA, 21 nt, synthetic construct
  modified_base 21: mod_base = OTHER; note = Inverted abasic nucleotide
  misc_feature 1..21: note = source = /note="Description of Artificial Sequence: Synthetic oligonucleotide"
  source 1..21: mol_type = other RNA
ctgcttcatgcctttctacan

SEQ ID NO: 1134 - RNA, 23 nt, synthetic construct
  misc_feature 1..23: note = source = /note="Description of Artificial Sequence: Synthetic oligonucleotide"
  source 1..23: mol_type = other RNA
atgtagaaaggcatgaagcagtt

SEQ ID NO: 1135 - RNA, 21 nt, synthetic construct
  modified_base 21: mod_base = OTHER; note = Inverted abasic nucleotide
  misc_feature 1..21: note = source = /note="Description of Artificial Sequence: Synthetic oligonucleotide"
  source 1..21: mol_type = other RNA
ctgcttcatgcctttctacan

SEQ ID NO: 1136 - RNA, 23 nt, synthetic construct
  misc_feature 1..23: note = source = /note="Description of Artificial Sequence: Synthetic oligonucleotide"
  source 1..23: mol_type = other RNA
atgtagaaaggcatgaagcagtt

SEQ ID NO: 1137 - RNA, 21 nt, synthetic construct
  modified_base 21: mod_base = OTHER; note = Inverted abasic nucleotide
  misc_feature 1..21: note = source = /note="Description of Artificial Sequence: Synthetic oligonucleotide"
  source 1..21: mol_type = other RNA
ctgcttcatgcctttctacan

SEQ ID NO: 1138 - RNA, 23 nt, synthetic construct
  misc_feature 1..23: note = source = /note="Description of Artificial Sequence: Synthetic oligonucleotide"
  source 1..23: mol_type = other RNA
atgtagaaaggcatgaagcagtt

SEQ ID NO: 1139 - RNA, 21 nt, synthetic construct
  modified_base 21: mod_base = OTHER; note = Inverted abasic nucleotide
  misc_feature 1..21: note = source = /note="Description of Artificial Sequence: Synthetic oligonucleotide"
  source 1..21: mol_type = other RNA
ctgcttcatgcctttctacan

SEQ ID NO: 1140 - RNA, 23 nt, synthetic construct
  misc_feature 1..23: note = source = /note="Description of Artificial Sequence: Synthetic oligonucleotide"
  source 1..23: mol_type = other RNA
atgtagaaaggcatgaagcagtt

SEQ ID NO: 1141 - RNA, 21 nt, synthetic construct
  modified_base 21: mod_base = OTHER; note = Inverted abasic nucleotide
  misc_feature 1..21: note = source = /note="Description of Artificial Sequence: Synthetic oligonucleotide"
  source 1..21: mol_type = other RNA
ctgcttcatgcctttctacan

SEQ ID NO: 1142 - RNA, 23 nt, synthetic construct
  misc_feature 1..23: note = source = /note="Description of Artificial Sequence: Synthetic oligonucleotide"
  source 1..23: mol_type = other RNA
atgtagaaaggcatgaagcagtt

SEQ ID NO: 1143 - RNA, 21 nt, synthetic construct
  modified_base 21: mod_base = OTHER; note = Inverted abasic nucleotide
  misc_feature 1..21: note = source = /note="Description of Artificial Sequence: Synthetic oligonucleotide"
  source 1..21: mol_type = other RNA
ctgcttcatgcctttctacan

SEQ ID NO: 1144 - RNA, 23 nt, synthetic construct
  misc_feature 1..23: note = source = /note="Description of Artificial Sequence: Synthetic oligonucleotide"
  source 1..23: mol_type = other RNA
atgtagaaaggcatgaagcagtt

SEQ ID NO: 1145 - RNA, 21 nt, synthetic construct
  modified_base 21: mod_base = OTHER; note = Inverted abasic nucleotide
  misc_feature 1..21: note = source = /note="Description of Artificial Sequence: Synthetic oligonucleotide"
  source 1..21: mol_type = other RNA
ctgcttcatgcctttctacan

SEQ ID NO: 1146 - RNA, 23 nt, synthetic construct
  misc_feature 1..23: note = source = /note="Description of Artificial Sequence: Synthetic oligonucleotide"
  source 1..23: mol_type = other RNA
atgtagaaaggcatgaagcagtt

SEQ ID NO: 1147 - RNA, 21 nt, synthetic construct
  modified_base 21: mod_base = OTHER; note = Inverted abasic nucleotide
  misc_feature 1..21: note = source = /note="Description of Artificial Sequence: Synthetic oligonucleotide"
  source 1..21: mol_type = other RNA
ctgcttcatgcctttctacan

SEQ ID NO: 1148 - RNA, 23 nt, synthetic construct
  misc_feature 1..23: note = source = /note="Description of Artificial Sequence: Synthetic oligonucleotide"
  source 1..23: mol_type = other RNA
atgtagaaaggcatgaagcagtt

SEQ ID NO: 1149 - RNA, 21 nt, synthetic construct
  modified_base 21: mod_base = OTHER; note = Inverted abasic nucleotide
  misc_feature 1..21: note = source = /note="Description of Artificial Sequence: Synthetic oligonucleotide"
  source 1..21: mol_type = other RNA
ctgcttcatgcctttctacan

SEQ ID NO: 1150 - DNA, 23 bp, synthetic construct
  misc_feature 1..23: note = source = /note="Description of Artificial Sequence: Synthetic oligonucleotide"
  misc_feature 1..23: note = source = /note="Description of Combined DNA/RNA Molecule: Synthetic oligonucleotide"
  source 1..23: mol_type = other DNA
atgtagaaaggcatgaagcagtt

SEQ ID NO: 1151 - RNA, 21 nt, synthetic construct
  modified_base 21: mod_base = OTHER; note = Inverted abasic nucleotide
  misc_feature 1..21: note = source = /note="Description of Artificial Sequence: Synthetic oligonucleotide"
  source 1..21: mol_type = other RNA
ctgcttcatgcctttctacan

SEQ ID NO: 1152 - DNA, 23 bp, synthetic construct
  misc_feature 1..23: note = source = /note="Description of Artificial Sequence: Synthetic oligonucleotide"
  misc_feature 1..23: note = source = /note="Description of Combined DNA/RNA Molecule: Synthetic oligonucleotide"
  source 1..23: mol_type = other DNA
atgtagaaaggcatgaagcagtt

SEQ ID NO: 1153 - RNA, 21 nt, synthetic construct
  modified_base 21: mod_base = OTHER; note = Inverted abasic nucleotide
  misc_feature 1..21: note = source = /note="Description of Artificial Sequence: Synthetic oligonucleotide"
  source 1..21: mol_type = other RNA
ctgcttcatgcctttctacan

SEQ ID NO: 1154 - DNA, 23 bp, synthetic construct
  misc_feature 1..23: note = source = /note="Description of Artificial Sequence: Synthetic oligonucleotide"
  misc_feature 1..23: note = source = /note="Description of Combined DNA/RNA Molecule: Synthetic oligonucleotide"
  source 1..23: mol_type = other DNA
atgtagaaaggcatgaagcagtt

SEQ ID NO: 1155 - RNA, 21 nt, synthetic construct
  modified_base 21: mod_base = OTHER; note = Inverted abasic nucleotide
  misc_feature 1..21: note = source = /note="Description of Artificial Sequence: Synthetic oligonucleotide"
  source 1..21: mol_type = other RNA
ctgcttcatgcctttctacan

SEQ ID NO: 1156 - RNA, 23 nt, synthetic construct
  misc_feature 1..23: note = source = /note="Description of Artificial Sequence: Synthetic oligonucleotide"
  source 1..23: mol_type = other RNA
atgtagaaaggcatgaagcagtt

SEQ ID NO: 1157 - RNA, 21 nt, synthetic construct
  modified_base 21: mod_base = OTHER; note = Inverted abasic nucleotide
  misc_feature 1..21: note = source = /note="Description of Artificial Sequence: Synthetic oligonucleotide"
  source 1..21: mol_type = other RNA
ctgcttcatgcctttctacan

SEQ ID NO: 1158 - RNA, 23 nt, synthetic construct
  misc_feature 1..23: note = source = /note="Description of Artificial Sequence: Synthetic oligonucleotide"
  source 1..23: mol_type = other RNA
atgtagaaaggcatgaagcagtt

SEQ ID NO: 1159 - RNA, 21 nt, synthetic construct
  modified_base 21: mod_base = OTHER; note = Inverted abasic nucleotide
  misc_feature 1..21: note = source = /note="Description of Artificial Sequence: Synthetic oligonucleotide"
  source 1..21: mol_type = other RNA
ctgcttcatgcctttctacan

SEQ ID NO: 1160 - RNA, 23 nt, synthetic construct
  misc_feature 1..23: note = source = /note="Description of Artificial Sequence: Synthetic oligonucleotide"
  source 1..23: mol_type = other RNA
atgtagaaaggcatgaagcagtt

SEQ ID NO: 1161 - RNA, 21 nt, synthetic construct
  modified_base 21: mod_base = OTHER; note = Inverted abasic nucleotide
  misc_feature 1..21: note = source = /note="Description of Artificial Sequence: Synthetic oligonucleotide"
  source 1..21: mol_type = other RNA
ctgcttcatgcctttctacan

SEQ ID NO: 1162 - RNA, 23 nt, synthetic construct
  misc_feature 1..23: note = source = /note="Description of Artificial Sequence: Synthetic oligonucleotide"
  source 1..23: mol_type = other RNA
atgtagaaaggcatgaagcagtt

SEQ ID NO: 1163 - RNA, 21 nt, synthetic construct
  modified_base 21: mod_base = OTHER; note = Inverted abasic nucleotide
  misc_feature 1..21: note = source = /note="Description of Artificial Sequence: Synthetic oligonucleotide"
  source 1..21: mol_type = other RNA
ctgcttcatgcctttctacan

SEQ ID NO: 1164 - RNA, 23 nt, synthetic construct
  misc_feature 1..23: note = source = /note="Description of Artificial Sequence: Synthetic oligonucleotide"
  source 1..23: mol_type = other RNA
atgtagaaaggcatgaagcagtt

SEQ ID NO: 1165 - RNA, 21 nt, synthetic construct
  modified_base 21: mod_base = OTHER; note = Inverted abasic nucleotide
  misc_feature 1..21: note = source = /note="Description of Artificial Sequence: Synthetic oligonucleotide"
  source 1..21: mol_type = other RNA
ctgcttcatgcctttctacan

SEQ ID NO: 1166 - RNA, 23 nt, synthetic construct
  misc_feature 1..23: note = source = /note="Description of Artificial Sequence: Synthetic oligonucleotide"
  source 1..23: mol_type = other RNA
atgtagaaaggcatgaagcagtt

SEQ ID NO: 1167 - RNA, 21 nt, synthetic construct
  modified_base 21: mod_base = OTHER; note = Inverted abasic nucleotide
  misc_feature 1..21: note = source = /note="Description of Artificial Sequence: Synthetic oligonucleotide"
  source 1..21: mol_type = other RNA
ctgcttcatgcctttctacan

SEQ ID NO: 1168 - RNA, 23 nt, synthetic construct
  misc_feature 1..23: note = source = /note="Description of Artificial Sequence: Synthetic oligonucleotide"
  source 1..23: mol_type = other RNA
atgtagaaaggcatgaagcagtt

SEQ ID NO: 1169 - DNA, 21 bp, synthetic construct
  misc_feature 1..21: note = source = /note="Description of Artificial Sequence: Synthetic oligonucleotide"
  misc_feature 1..21: note = source = /note="Description of Combined DNA/RNA Molecule: Synthetic oligonucleotide"
  source 1..21: mol_type = other DNA
tgcttcatgcctttctacaga

SEQ ID NO: 1170 - RNA, 23 nt, synthetic construct
  misc_feature 1..23: note = source = /note="Description of Artificial Sequence: Synthetic oligonucleotide"
  source 1..23: mol_type = other RNA
tctgtagaaaggcatgaagcatt

SEQ ID NO: 1171 - DNA, 21 bp, synthetic construct
  misc_feature 1..21: note = source = /note="Description of Artificial Sequence: Synthetic oligonucleotide"
  misc_feature 1..21: note = source = /note="Description of Combined DNA/RNA Molecule: Synthetic oligonucleotide"
  source 1..21: mol_type = other DNA
tgcttcatgcctttctacaga

SEQ ID NO: 1172 - RNA, 23 nt, synthetic construct
  misc_feature 1..23: note = source = /note="Description of Artificial Sequence: Synthetic oligonucleotide"
  source 1..23: mol_type = other RNA
tctgtagaaaggcatgaagcatt

SEQ ID NO: 1173 - DNA, 21 bp, synthetic construct
  misc_feature 1..21: note = source = /note="Description of Artificial Sequence: Synthetic oligonucleotide"
  misc_feature 1..21: note = source = /note="Description of Combined DNA/RNA Molecule: Synthetic oligonucleotide"
  source 1..21: mol_type = other DNA
tgcttcatgcctttctacaga

SEQ ID NO: 1174 - RNA, 23 nt, synthetic construct
  misc_feature 1..23: note = source = /note="Description of Artificial Sequence: Synthetic oligonucleotide"
  source 1..23: mol_type = other RNA
tctgtagaaaggcatgaagcatt

SEQ ID NO: 1175 - DNA, 21 bp, synthetic construct
  misc_feature 1..21: note = source = /note="Description of Artificial Sequence: Synthetic oligonucleotide"
  misc_feature 1..21: note = source = /note="Description of Combined DNA/RNA Molecule: Synthetic oligonucleotide"
  source 1..21: mol_type = other DNA
tgcttcatgcctttctacaga

SEQ ID NO: 1176 - RNA, 23 nt, synthetic construct
  misc_feature 1..23: note = source = /note="Description of Artificial Sequence: Synthetic oligonucleotide"
  source 1..23: mol_type = other RNA
tctgtagaaaggcatgaagcatt

SEQ ID NO: 1177 - DNA, 21 bp, synthetic construct
  misc_feature 1..21: note = source = /note="Description of Artificial Sequence: Synthetic oligonucleotide"
  misc_feature 1..21: note = source = /note="Description of Combined DNA/RNA Molecule: Synthetic oligonucleotide"
  source 1..21: mol_type = other DNA
tgcttcatgcctttctacaga

SEQ ID NO: 1178 - RNA, 23 nt, synthetic construct
  misc_feature 1..23: note = source = /note="Description of Artificial Sequence: Synthetic oligonucleotide"
  source 1..23: mol_type = other RNA
tctgtagaaaggcatgaagcatt

SEQ ID NO: 1179 - DNA, 21 bp, synthetic construct
  misc_feature 1..21: note = source = /note="Description of Artificial Sequence: Synthetic oligonucleotide"
  misc_feature 1..21: note = source = /note="Description of Combined DNA/RNA Molecule: Synthetic oligonucleotide"
  source 1..21: mol_type = other DNA
tgcttcatgcctttctacaga

SEQ ID NO: 1180 - RNA, 23 nt, synthetic construct
  modified_base 2: mod_base = OTHER; note = Abasic nucleotide
  misc_feature 1..23: note = source = /note="Description of Artificial Sequence: Synthetic oligonucleotide"
  source 1..23: mol_type = other RNA
tntgtagaaaggcatgaagcatt

SEQ ID NO: 1181 - DNA, 21 bp, synthetic construct
  misc_feature 1..21: note = source = /note="Description of Artificial Sequence: Synthetic oligonucleotide"
  misc_feature 1..21: note = source = /note="Description of Combined DNA/RNA Molecule: Synthetic oligonucleotide"
  source 1..21: mol_type = other DNA
tgcttcatgcctttctacaga

SEQ ID NO: 1182 - RNA, 23 nt, synthetic construct
  modified_base 3: mod_base = OTHER; note = Abasic nucleotide
  misc_feature 1..23: note = source = /note="Description of Artificial Sequence: Synthetic oligonucleotide"
  source 1..23: mol_type = other RNA
tcngtagaaaggcatgaagcatt

SEQ ID NO: 1183 - DNA, 21 bp, synthetic construct
  misc_feature 1..21: note = source = /note="Description of Artificial Sequence: Synthetic oligonucleotide"
  misc_feature 1..21: note = source = /note="Description of Combined DNA/RNA Molecule: Synthetic oligonucleotide"
  source 1..21: mol_type = other DNA
tgcttcatgcctttctacaga

SEQ ID NO: 1184 - RNA, 23 nt, synthetic construct
  modified_base 4: mod_base = OTHER; note = Abasic nucleotide
  misc_feature 1..23: note = source = /note="Description of Artificial Sequence: Synthetic oligonucleotide"
  source 1..23: mol_type = other RNA
tctntagaaaggcatgaagcatt

SEQ ID NO: 1185 - DNA, 21 bp, synthetic construct
  misc_feature 1..21: note = source = /note="Description of Artificial Sequence: Synthetic oligonucleotide"
  misc_feature 1..21: note = source = /note="Description of Combined DNA/RNA Molecule: Synthetic oligonucleotide"
  source 1..21: mol_type = other DNA
tgcttcatgcctttctacaga

SEQ ID NO: 1186 - RNA, 23 nt, synthetic construct
  modified_base 5: mod_base = OTHER; note = Abasic nucleotide
  misc_feature 1..23: note = source = /note="Description of Artificial Sequence: Synthetic oligonucleotide"
  source 1..23: mol_type = other RNA
tctgnagaaaggcatgaagcatt

SEQ ID NO: 1187 - DNA, 21 bp, synthetic construct
  misc_feature 1..21: note = source = /note="Description of Artificial Sequence: Synthetic oligonucleotide"
  misc_feature 1..21: note = source = /note="Description of Combined DNA/RNA Molecule: Synthetic oligonucleotide"
  source 1..21: mol_type = other DNA
tgcttcatgcctttctacaga

SEQ ID NO: 1188 - RNA, 23 nt, synthetic construct
  modified_base 6: mod_base = OTHER; note = Abasic nucleotide
  misc_feature 1..23: note = source = /note="Description of Artificial Sequence: Synthetic oligonucleotide"
  source 1..23: mol_type = other RNA
tctgtngaaaggcatgaagcatt

SEQ ID NO: 1189 - DNA, 21 bp, synthetic construct
  misc_feature 1..21: note = source = /note="Description of Artificial Sequence: Synthetic oligonucleotide"
  misc_feature 1..21: note = source = /note="Description of Combined DNA/RNA Molecule: Synthetic oligonucleotide"
  source 1..21: mol_type = other DNA
tgcttcatgcctttctacaga

SEQ ID NO: 1190 - RNA, 23 nt, synthetic construct
  modified_base 7: mod_base = OTHER; note = Abasic nucleotide
  misc_feature 1..23: note = source = /note="Description of Artificial Sequence: Synthetic oligonucleotide"
  source 1..23: mol_type = other RNA
tctgtanaaaggcatgaagcatt

SEQ ID NO: 1191 - DNA, 21 bp, synthetic construct
  misc_feature 1..21: note = source = /note="Description of Artificial Sequence: Synthetic oligonucleotide"
  misc_feature 1..21: note = source = /note="Description of Combined DNA/RNA Molecule: Synthetic oligonucleotide"
  source 1..21: mol_type = other DNA
tgcttcatgcctttctacaga

SEQ ID NO: 1192 - RNA, 23 nt, synthetic construct
  modified_base 8: mod_base = OTHER; note = Abasic nucleotide
  misc_feature 1..23: note = source = /note="Description of Artificial Sequence: Synthetic oligonucleotide"
  source 1..23: mol_type = other RNA
tctgtagnaaggcatgaagcatt

SEQ ID NO: 1193 - DNA, 21 bp, synthetic construct
  misc_feature 1..21: note = source = /note="Description of Artificial Sequence: Synthetic oligonucleotide"
  misc_feature 1..21: note = source = /note="Description of Combined DNA/RNA Molecule: Synthetic oligonucleotide"
  source 1..21: mol_type = other DNA
tcatgcctttctacagtggct

SEQ ID NO: 1194 - RNA, 23 nt, synthetic construct
  misc_feature 1..23: note = source = /note="Description of Artificial Sequence: Synthetic oligonucleotide"
  source 1..23: mol_type = other RNA
agccactgtagaaaggcatgatt

SEQ ID NO: 1195 - RNA, 21 nt, synthetic construct
  modified_base 21: mod_base = OTHER; note = Inverted abasic nucleotide
  misc_feature 1..21: note = source = /note="Description of Artificial Sequence: Synthetic oligonucleotide"
  source 1..21: mol_type = other RNA
tcatgcctttctacagtggcn

SEQ ID NO: 1196 - RNA, 23 nt, synthetic construct
  misc_feature 1..23: note = source = /note="Description of Artificial Sequence: Synthetic oligonucleotide"
  source 1..23: mol_type = other RNA
tgccactgtagaaaggcatgatt

SEQ ID NO: 1197 - DNA, 21 bp, synthetic construct
  misc_feature 1..21: note = source = /note="Description of Artificial Sequence: Synthetic oligonucleotide"
  misc_feature 1..21: note = source = /note="Description of Combined DNA/RNA Molecule: Synthetic oligonucleotide"
  source 1..21: mol_type = other DNA
tcatgcctttctacagtggca

SEQ ID NO: 1198 - RNA, 23 nt, synthetic construct
  misc_feature 1..23: note = source = /note="Description of Artificial Sequence: Synthetic oligonucleotide"
  source 1..23: mol_type = other RNA
tgccactgtagaaaggcatgatt

SEQ ID NO: 1199 - DNA, 21 bp, synthetic construct
  misc_feature 1..21: note = source = /note="Description of Artificial Sequence: Synthetic oligonucleotide"
  misc_feature 1..21: note = source = /note="Description of Combined DNA/RNA Molecule: Synthetic oligonucleotide"
  source 1..21: mol_type = other DNA
tcctgcttcatgcctttctat

SEQ ID NO: 1200 - RNA, 23 nt, synthetic construct
  misc_feature 1..23: note = source = /note="Description of Artificial Sequence: Synthetic oligonucleotide"
  source 1..23: mol_type = other RNA
atagaaaggcatgaagcaggatt

SEQ ID NO: 1201 - RNA, 21 nt, synthetic construct
  modified_base 21: mod_base = OTHER; note = Inverted abasic nucleotide
  misc_feature 1..21: note = source = /note="Description of Artificial Sequence: Synthetic oligonucleotide"
  source 1..21: mol_type = other RNA
tcctgcttcatgcctttctan

SEQ ID NO: 1202 - RNA, 23 nt, synthetic construct
  misc_feature 1..23: note = source = /note="Description of Artificial Sequence: Synthetic oligonucleotide"
  source 1..23: mol_type = other RNA
ttagaaaggcatgaagcaggatt

SEQ ID NO: 1203 - DNA, 21 bp, synthetic construct
  misc_feature 1..21: note = source = /note="Description of Artificial Sequence: Synthetic oligonucleotide"
  misc_feature 1..21: note = source = /note="Description of Combined DNA/RNA Molecule: Synthetic oligonucleotide"
  source 1..21: mol_type = other DNA
tcctgcttcatgcctttctaa

SEQ ID NO: 1204 - RNA, 23 nt, synthetic construct
  misc_feature 1..23: note = source = /note="Description of Artificial Sequence: Synthetic oligonucleotide"
  source 1..23: mol_type = other RNA
ttagaaaggcatgaagcaggatt

SEQ ID NO: 1205 - DNA, 21 bp, synthetic construct
  misc_feature 1..21: note = source = /note="Description of Artificial Sequence: Synthetic oligonucleotide"
  misc_feature 1..21: note = source = /note="Description of Combined DNA/RNA Molecule: Synthetic oligonucleotide"
  source 1..21: mol_type = other DNA
tatgttcctgcttcatgcctt

SEQ ID NO: 1206 - RNA, 23 nt, synthetic construct
  misc_feature 1..23: note = source = /note="Description of Artificial Sequence: Synthetic oligonucleotide"
  source 1..23: mol_type = other RNA
aaggcatgaagcaggaacatatt

SEQ ID NO: 1207 - RNA, 21 nt, synthetic construct
  modified_base 21: mod_base = OTHER; note = Inverted abasic nucleotide
  misc_feature 1..21: note = source = /note="Description of Artificial Sequence: Synthetic oligonucleotide"
  source 1..21: mol_type = other RNA
tatgttcctgcttcatgcctn

SEQ ID NO: 1208 - RNA, 23 nt, synthetic construct
  misc_feature 1..23: note = source = /note="Description of Artificial Sequence: Synthetic oligonucleotide"
  source 1..23: mol_type = other RNA
taggcatgaagcaggaacatatt

SEQ ID NO: 1209 - DNA, 21 bp, synthetic construct
  misc_feature 1..21: note = source = /note="Description of Artificial Sequence: Synthetic oligonucleotide"
  misc_feature 1..21: note = source = /note="Description of Combined DNA/RNA Molecule: Synthetic oligonucleotide"
  source 1..21: mol_type = other DNA
tatgttcctgcttcatgccta

SEQ ID NO: 1210 - RNA, 23 nt, synthetic construct
  misc_feature 1..23: note = source = /note="Description of Artificial Sequence: Synthetic oligonucleotide"
  source 1..23: mol_type = other RNA
taggcatgaagcaggaacatatt

SEQ ID NO: 1211 - RNA, 21 nt, synthetic construct
  modified_base 21: mod_base = OTHER; note = Inverted abasic nucleotide
  misc_feature 1..21: note = source = /note="Description of Artificial Sequence: Synthetic oligonucleotide"
  source 1..21: mol_type = other RNA
tcctgcttcatgcctttctan

SEQ ID NO: 1212 - RNA, 23 nt, synthetic construct
  misc_feature 1..23: note = source = /note="Description of Artificial Sequence: Synthetic oligonucleotide"
  source 1..23: mol_type = other RNA
atagaaaggcatgaagcaggatt

SEQ ID NO: 1213 - RNA, 21 nt, synthetic construct
  modified_base 21: mod_base = OTHER; note = Inverted abasic nucleotide
  misc_feature 1..21: note = source = /note="Description of Artificial Sequence: Synthetic oligonucleotide"
  source 1..21: mol_type = other RNA
tatgttcctgcttcatgcctn

SEQ ID NO: 1214 - RNA, 23 nt, synthetic construct
  misc_feature 1..23: note = source = /note="Description of Artificial Sequence: Synthetic oligonucleotide"
  source 1..23: mol_type = other RNA
aaggcatgaagcaggaacatatt

SEQ ID NO: 1215 - DNA, 21 bp, synthetic construct
  misc_feature 1..21: note = source = /note="Description of Artificial Sequence: Synthetic oligonucleotide"
  misc_feature 1..21: note = source = /note="Description of Combined DNA/RNA Molecule: Synthetic oligonucleotide"
  source 1..21: mol_type = other DNA
tcatgcctttctacagtggct

SEQ ID NO: 1216 - RNA, 23 nt, synthetic construct
  misc_feature 1..23: note = source = /note="Description of Artificial Sequence: Synthetic oligonucleotide"
  source 1..23: mol_type = other RNA
agccactgtagaaaggcatgatt

SEQ ID NO: 1217 - DNA, 21 bp, synthetic construct
  misc_feature 1..21: note = source = /note="Description of Artificial Sequence: Synthetic oligonucleotide"
  misc_feature 1..21: note = source = /note="Description of Combined DNA/RNA Molecule: Synthetic oligonucleotide"
  source 1..21: mol_type = other DNA
tcctgcttcatgcctttctat

SEQ ID NO: 1218 - RNA, 23 nt, synthetic construct
  misc_feature 1..23: note = source = /note="Description of Artificial Sequence: Synthetic oligonucleotide"
  source 1..23: mol_type = other RNA
atagaaaggcatgaagcaggatt

SEQ ID NO: 1219 - DNA, 21 bp, synthetic construct
  misc_feature 1..21: note = source = /note="Description of Artificial Sequence: Synthetic oligonucleotide"
  misc_feature 1..21: note = source = /note="Description of Combined DNA/RNA Molecule: Synthetic oligonucleotide"
  source 1..21: mol_type = other DNA
tcctgcttcatgcctttctaa

SEQ ID NO: 1220 - RNA, 23 nt, synthetic construct
  misc_feature 1..23: note = source = /note="Description of Artificial Sequence: Synthetic oligonucleotide"
  source 1..23: mol_type = other RNA
ttagaaaggcatgaagcaggatt

SEQ ID NO: 1221 - DNA, 21 bp, synthetic construct
  misc_feature 1..21: note = source = /note="Description of Artificial Sequence: Synthetic oligonucleotide"
  misc_feature 1..21: note = source = /note="Description of Combined DNA/RNA Molecule: Synthetic oligonucleotide"
  source 1..21: mol_type = other DNA
tatgttcctgcttcatgccta

SEQ ID NO: 1222 - RNA, 23 nt, synthetic construct
  misc_feature 1..23: note = source = /note="Description of Artificial Sequence: Synthetic oligonucleotide"
  source 1..23: mol_type = other RNA
taggcatgaagcaggaacatatt

SEQ ID NO: 1223 - DNA, 21 bp, synthetic construct
  misc_feature 1..21: note = source = /note="Description of Artificial Sequence: Synthetic oligonucleotide"
  misc_feature 1..21: note = source = /note="Description of Combined DNA/RNA Molecule: Synthetic oligonucleotide"
  source 1..21: mol_type = other DNA
tgcttcatgcctttctacaga

SEQ ID NO: 1224 - RNA, 23 nt, synthetic construct
  misc_feature 1..23: note = source = /note="Description of Artificial Sequence: Synthetic oligonucleotide"
  source 1..23: mol_type = other RNA
tctgtagaaaggcatgaagcatt

SEQ ID NO: 1225 - RNA, 21 nt, synthetic construct
  modified_base 21: mod_base = OTHER; note = Inverted abasic nucleotide
  misc_feature 1..21: note = source = /note="Description of Artificial Sequence: Synthetic oligonucleotide"
  source 1..21: mol_type = other RNA
ctgcttcatgcctttctacan

SEQ ID NO: 1226 - RNA, 23 nt, synthetic construct
  misc_feature 1..23: note = source = /note="Description of Artificial Sequence: Synthetic oligonucleotide"
  source 1..23: mol_type = other RNA
atgtagaaaggcatgaagcagtt

SEQ ID NO: 1227 - RNA, 21 nt, synthetic construct
  modified_base 21: mod_base = OTHER; note = Inverted abasic nucleotide
  misc_feature 1..21: note = source = /note="Description of Artificial Sequence: Synthetic oligonucleotide"
  source 1..21: mol_type = other RNA
ctgcttcatgcctttctacan

SEQ ID NO: 1228 - RNA, 23 nt, synthetic construct
  misc_feature 1..23: note = source = /note="Description of Artificial Sequence: Synthetic oligonucleotide"
  source 1..23: mol_type = other RNA
atgtagaaaggcatgaagcagtt

SEQ ID NO: 1229 - RNA, 21 nt, synthetic construct
  modified_base 21: mod_base = OTHER; note = Inverted abasic nucleotide
  misc_feature 1..21: note = source = /note="Description of Artificial Sequence: Synthetic oligonucleotide"
  source 1..21: mol_type = other RNA
ctgcttcatgcctttctacan

SEQ ID NO: 1230 - RNA, 23 nt, synthetic construct
  misc_feature 1..23: note = source = /note="Description of Artificial Sequence: Synthetic oligonucleotide"
  source 1..23: mol_type = other RNA
atgtagaaaggcatgaagcagtt

SEQ ID NO: 1231 - RNA, 21 nt, synthetic construct
  modified_base 21: mod_base = OTHER; note = Inverted abasic nucleotide
  misc_feature 1..21: note = source = /note="Description of Artificial Sequence: Synthetic oligonucleotide"
  source 1..21: mol_type = other RNA
ctgcttcatgcctttctacan

SEQ ID NO: 1232 - RNA, 23 nt, synthetic construct
  misc_feature 1..23: note = source = /note="Description of Artificial Sequence: Synthetic oligonucleotide"
  source 1..23: mol_type = other RNA
atgtagaaaggcatgaagcagtt

SEQ ID NO: 1233 - RNA, 21 nt, synthetic construct
  modified_base 21: mod_base = OTHER; note = Inverted abasic nucleotide
  misc_feature 1..21: note = source = /note="Description of Artificial Sequence: Synthetic oligonucleotide"
  source 1..21: mol_type = other RNA
ctgcttcatgcctttctacan

SEQ ID NO: 1234 - RNA, 23 nt, synthetic construct
  misc_feature 1..23: note = source = /note="Description of Artificial Sequence: Synthetic oligonucleotide"
  source 1..23: mol_type = other RNA
atgtagaaaggcatgaagcagtt

SEQ ID NO: 1235 - RNA, 21 nt, synthetic construct
  modified_base 21: mod_base = OTHER; note = Inverted abasic nucleotide
  misc_feature 1..21: note = source = /note="Description of Artificial Sequence: Synthetic oligonucleotide"
  source 1..21: mol_type = other RNA
ctgcttcatgcctttctacan

SEQ ID NO: 1236 - RNA, 23 nt, synthetic construct
  misc_feature 1..23: note = source = /note="Description of Artificial Sequence: Synthetic oligonucleotide"
  source 1..23: mol_type = other RNA
atgtagaaaggcatgaagcagtt

SEQ ID NO: 1237 - RNA, 21 nt, synthetic construct
  modified_base 21: mod_base = OTHER; note = Inverted abasic nucleotide
  misc_feature 1..21: note = source = /note="Description of Artificial Sequence: Synthetic oligonucleotide"
  source 1..21: mol_type = other RNA
ctgcttcatgcctttctacan

SEQ ID NO: 1238 - RNA, 23 nt, synthetic construct
  misc_feature 1..23: note = source = /note="Description of Artificial Sequence: Synthetic oligonucleotide"
  source 1..23: mol_type = other RNA
atgtagaaaggcatgaagcagtt

SEQ ID NO: 1239 - RNA, 21 nt, synthetic construct
  modified_base 21: mod_base = OTHER; note = Inverted abasic nucleotide
  misc_feature 1..21: note = source = /note="Description of Artificial Sequence: Synthetic oligonucleotide"
  source 1..21: mol_type = other RNA
ctgcttcatgcctttctacan

SEQ ID NO: 1240 - RNA, 23 nt, synthetic construct
  misc_feature 1..23: note = source = /note="Description of Artificial Sequence: Synthetic oligonucleotide"
  source 1..23: mol_type = other RNA
atgtagaaaggcatgaagcagtt

SEQ ID NO: 1241 - RNA, 21 nt, synthetic construct
  modified_base 21: mod_base = OTHER; note = Inverted abasic nucleotide
  misc_feature 1..21: note = source = /note="Description of Artificial Sequence: Synthetic oligonucleotide"
  source 1..21: mol_type = other RNA
ctgcttcatgcctttctacan

SEQ ID NO: 1242 - RNA, 23 nt, synthetic construct
  misc_feature 1..23: note = source = /note="Description of Artificial Sequence: Synthetic oligonucleotide"
  source 1..23: mol_type = other RNA
atgtagaaaggcatgaagcagtt

SEQ ID NO: 1243 - DNA, 21 bp, synthetic construct
  modified_base 21: mod_base = OTHER; note = Inverted abasic nucleotide
  misc_feature 1..21: note = source = /note="Description of Artificial Sequence: Synthetic oligonucleotide"
  misc_feature 1..21: note = source = /note="Description of Combined DNA/RNA Molecule: Synthetic oligonucleotide"
  source 1..21: mol_type = other DNA
ctgcttcatgcctttctacan

SEQ ID NO: 1244 - RNA, 23 nt, synthetic construct
  misc_feature 1..23: note = source = /note="Description of Artificial Sequence: Synthetic oligonucleotide"
  source 1..23: mol_type = other RNA
atgtagaaaggcatgaagcagtt

SEQ ID NO: 1245 - DNA, 21 bp, synthetic construct
  modified_base 21: mod_base = OTHER; note = Inverted abasic nucleotide
  misc_feature 1..21: note = source = /note="Description of Artificial Sequence: Synthetic oligonucleotide"
  misc_feature 1..21: note = source = /note="Description of Combined DNA/RNA Molecule: Synthetic oligonucleotide"
  source 1..21: mol_type = other DNA
ctgcttcatgcctttctacan

SEQ ID NO: 1246 - RNA, 23 nt, synthetic construct
  misc_feature 1..23: note = source = /note="Description of Artificial Sequence: Synthetic oligonucleotide"
  source 1..23: mol_type = other RNA
atgtagaaaggcatgaagcagtt

SEQ ID NO: 1247 - DNA, 21 bp, synthetic construct
  modified_base 21: mod_base = OTHER; note = Inverted abasic nucleotide
  misc_feature 1..21: note = source = /note="Description of Artificial Sequence: Synthetic oligonucleotide"
  misc_feature 1..21: note = source = /note="Description of Combined DNA/RNA Molecule: Synthetic oligonucleotide"
  source 1..21: mol_type = other DNA
ctgcttcatgcctttctacan

SEQ ID NO: 1248 - RNA, 23 nt, synthetic construct
  misc_feature 1..23: note = source = /note="Description of Artificial Sequence: Synthetic oligonucleotide"
  source 1..23: mol_type = other RNA
atgtagaaaggcatgaagcagtt

SEQ ID NO: 1249 - DNA, 21 bp, synthetic construct
  modified_base 21: mod_base = OTHER; note = Inverted abasic nucleotide
  misc_feature 1..21: note = source = /note="Description of Artificial Sequence: Synthetic oligonucleotide"
  misc_feature 1..21: note = source = /note="Description of Combined DNA/RNA Molecule: Synthetic oligonucleotide"
  source 1..21: mol_type = other DNA
ctgcttcatgcctttctacan

SEQ ID NO: 1250 - RNA, 23 nt, synthetic construct
  misc_feature 1..23: note = source = /note="Description of Artificial Sequence: Synthetic oligonucleotide"
  source 1..23: mol_type = other RNA
atgtagaaaggcatgaagcagtt

SEQ ID NO: 1251 - RNA, 21 nt, synthetic construct
  modified_base 21: mod_base = OTHER; note = Inverted abasic nucleotide
  misc_feature 1..21: note = source = /note="Description of Artificial Sequence: Synthetic oligonucleotide"
  source 1..21: mol_type = other RNA
ctgcttcatgcctttctacan

SEQ ID NO: 1252 - RNA, 23 nt, synthetic construct
  misc_feature 1..23: note = source = /note="Description of Artificial Sequence: Synthetic oligonucleotide"
  source 1..23: mol_type = other RNA
atgtagaaaggcatgaagcagtt

SEQ ID NO: 1253 - RNA, 21 nt, synthetic construct
  modified_base 21: mod_base = OTHER; note = Inverted abasic nucleotide
  misc_feature 1..21: note = source = /note="Description of Artificial Sequence: Synthetic oligonucleotide"
  source 1..21: mol_type = other RNA
ctgcttcatgcctttctacan

SEQ ID NO: 1254 - RNA, 23 nt, synthetic construct
  misc_feature 1..23: note = source = /note="Description of Artificial Sequence: Synthetic oligonucleotide"
  source 1..23: mol_type = other RNA
atgtagaaaggcatgaagcagtt

SEQ ID NO: 1255 - DNA, 21 bp, synthetic construct
  modified_base 21: mod_base = OTHER; note = Inverted abasic nucleotide
  misc_feature 1..21: note = source = /note="Description of Artificial Sequence: Synthetic oligonucleotide"
  misc_feature 1..21: note = source = /note="Description of Combined DNA/RNA Molecule: Synthetic oligonucleotide"
  source 1..21: mol_type = other DNA
ctgcttcatgcctttctacan

SEQ ID NO: 1256 - RNA, 23 nt, synthetic construct
  modified_base 7: mod_base = OTHER; note = Abasic nucleotide
  misc_feature 1..23: note = source = /note="Description of Artificial Sequence: Synthetic oligonucleotide"
  source 1..23: mol_type = other RNA
atgtagnaaggcatgaagcagtt

SEQ ID NO: 1257 - DNA, 21 bp, synthetic construct
  modified_base 21: mod_base = OTHER; note = Inverted abasic nucleotide
  misc_feature 1..21: note = source = /note="Description of Artificial Sequence: Synthetic oligonucleotide"
  misc_feature 1..21: note = source = /note="Description of Combined DNA/RNA Molecule: Synthetic oligonucleotide"
  source 1..21: mol_type = other DNA
ctgcttcatgcctttctacan

SEQ ID NO: 1258 - RNA, 23 nt, synthetic construct
  modified_base 5: mod_base = OTHER; note = Abasic nucleotide
  misc_feature 1..23: note = source = /note="Description of Artificial Sequence: Synthetic oligonucleotide"
  source 1..23: mol_type = other RNA
atgtngaaaggcatgaagcagtt

SEQ ID NO: 1259 - RNA, 21 nt, synthetic construct
  modified_base 21: mod_base = OTHER; note = Inverted abasic nucleotide
  misc_feature 1..21: note = source = /note="Description of Artificial Sequence: Synthetic oligonucleotide"
  source 1..21: mol_type = other RNA
ctgcttcatgcctttctacan

SEQ ID NO: 1260 - RNA, 23 nt, synthetic construct
  modified_base 4: mod_base = OTHER; note = Abasic nucleotide
  misc_feature 1..23: note = source = /note="Description of Artificial Sequence: Synthetic oligonucleotide"
  source 1..23: mol_type = other RNA
atgnagaaaggcatgaagcagtt

SEQ ID NO: 1261 - RNA, 21 nt, synthetic construct
  modified_base 21: mod_base = OTHER; note = Inverted abasic nucleotide
  misc_feature 1..21: note = source = /note="Description of Artificial Sequence: Synthetic oligonucleotide"
  source 1..21: mol_type = other RNA
ctgcttcatgcctttctacan

SEQ ID NO: 1262 - RNA, 23 nt, synthetic construct
  misc_feature 1..23: note = source = /note="Description of Artificial Sequence: Synthetic oligonucleotide"
  source 1..23: mol_type = other RNA
atgtagaaaggcatgaagcagtt

SEQ ID NO: 1263 - RNA, 21 nt, synthetic construct
  modified_base 21: mod_base = OTHER; note = Inverted abasic nucleotide
  misc_feature 1..21: note = source = /note="Description of Artificial Sequence: Synthetic oligonucleotide"
  source 1..21: mol_type = other RNA
ctgcttcatgcctttctacan

SEQ ID NO: 1264 - RNA, 23 nt, synthetic construct
  misc_feature 1..23: note = source = /note="Description of Artificial Sequence: Synthetic oligonucleotide"
  source 1..23: mol_type = other RNA
atgtagaaaggcatgaagcagtt

SEQ ID NO: 1265 - DNA, 21 bp, synthetic construct
  modified_base 21: mod_base = OTHER; note = Inverted abasic nucleotide
  misc_feature 1..21: note = source = /note="Description of Artificial Sequence: Synthetic oligonucleotide"
  misc_feature 1..21: note = source = /note="Description of Combined DNA/RNA Molecule: Synthetic oligonucleotide"
  source 1..21: mol_type = other DNA
ctgcttcatgcctttctacan

SEQ ID NO: 1266 - RNA, 23 nt, synthetic construct
  misc_feature 1..23: note = source = /note="Description of Artificial Sequence: Synthetic oligonucleotide"
  source 1..23: mol_type = other RNA
atgtagaaaggcatgaagcagtt

SEQ ID NO: 1267 - DNA, 21 bp, synthetic construct
  modified_base 21: mod_base = OTHER; note = Inverted abasic nucleotide
  misc_feature 1..21: note = source = /note="Description of Artificial Sequence: Synthetic oligonucleotide"
  misc_feature 1..21: note = source = /note="Description of Combined DNA/RNA Molecule: Synthetic oligonucleotide"
  source 1..21: mol_type = other DNA
ctgcttcatgcctttctacan

SEQ ID NO: 1268 - RNA, 23 nt, synthetic construct
  misc_feature 1..23: note = source = /note="Description of Artificial Sequence: Synthetic oligonucleotide"
  source 1..23: mol_type = other RNA
atgtagaaaggcatgaagcagtt

SEQ ID NO: 1269 - DNA, 21 bp, synthetic construct
  modified_base 21: mod_base = OTHER; note = Inverted abasic nucleotide
  misc_feature 1..21: note = source = /note="Description of Artificial Sequence: Synthetic oligonucleotide"
  misc_feature 1..21: note = source = /note="Description of Combined DNA/RNA Molecule: Synthetic oligonucleotide"
  source 1..21: mol_type = other DNA
ctgcttcatgcctttctacan

SEQ ID NO: 1270 - RNA, 23 nt, synthetic construct
  misc_feature 1..23: note = source = /note="Description of Artificial Sequence: Synthetic oligonucleotide"
  source 1..23: mol_type = other RNA
atgtagaaaggcatgaagcagtt

SEQ ID NO: 1271 - DNA, 21 bp, synthetic construct
  modified_base 21: mod_base = OTHER; note = Inverted abasic nucleotide
  misc_feature 1..21: note = source = /note="Description of Artificial Sequence: Synthetic oligonucleotide"
  misc_feature 1..21: note = source = /note="Description of Combined DNA/RNA Molecule: Synthetic oligonucleotide"
  source 1..21: mol_type = other DNA
ctgcttcatgcctttctacan

SEQ ID NO: 1272 - RNA, 23 nt, synthetic construct
  misc_feature 1..23: note = source = /note="Description of Artificial Sequence: Synthetic oligonucleotide"
  source 1..23: mol_type = other RNA
atgtagaaaggcatgaagcagtt

SEQ ID NO: 1273 - DNA, 21 bp, synthetic construct
  misc_feature 1..21: note = source = /note="Description of Artificial Sequence: Synthetic oligonucleotide"
  misc_feature 1..21: note = source = /note="Description of Combined DNA/RNA Molecule: Synthetic oligonucleotide"
  source 1..21: mol_type = other DNA
tgcttcatgcctttctacaga

SEQ ID NO: 1274 - RNA, 23 nt, synthetic construct
  modified_base 5: mod_base = OTHER; note = Abasic nucleotide
  misc_feature 1..23: note = source = /note="Description of Artificial Sequence: Synthetic oligonucleotide"
  source 1..23: mol_type = other RNA
tctgnagaaaggcatgaagcatt

SEQ ID NO: 1275 - DNA, 21 bp, synthetic construct
  misc_feature 1..21: note = source = /note="Description of Artificial Sequence: Synthetic oligonucleotide"
  misc_feature 1..21: note = source = /note="Description of Combined DNA/RNA Molecule: Synthetic oligonucleotide"
  source 1..21: mol_type = other DNA
tgcttcatgcctttctacaga

SEQ ID NO: 1276 - RNA, 23 nt, synthetic construct
  modified_base 6: mod_base = OTHER; note = Abasic nucleotide
  misc_feature 1..23: note = source = /note="Description of Artificial Sequence: Synthetic oligonucleotide"
  source 1..23: mol_type = other RNA
tctgtngaaaggcatgaagcatt

SEQ ID NO: 1277 - DNA, 21 bp, synthetic construct
  misc_feature 1..21: note = source = /note="Description of Artificial Sequence: Synthetic oligonucleotide"
  misc_feature 1..21: note = source = /note="Description of Combined DNA/RNA Molecule: Synthetic oligonucleotide"
  source 1..21: mol_type = other DNA
tgcttcatgcctttctacaga

SEQ ID NO: 1278 - RNA, 23 nt, synthetic construct
  modified_base 8: mod_base = OTHER; note = Abasic nucleotide
  misc_feature 1..23: note = source = /note="Description of Artificial Sequence: Synthetic oligonucleotide"
  source 1..23: mol_type = other RNA
tctgtagnaaggcatgaagcatt

SEQ ID NO: 1279 - DNA, 21 bp, synthetic construct
  misc_feature 1..21: note = source = /note="Description of Artificial Sequence: Synthetic oligonucleotide"
  misc_feature 1..21: note = source = /note="Description of Combined DNA/RNA Molecule: Synthetic oligonucleotide"
  source 1..21: mol_type = other DNA
tgcttcatgcctttctacaga

SEQ ID NO: 1280 - RNA, 23 nt, synthetic construct
  misc_feature 1..23: note = source = /note="Description of Artificial Sequence: Synthetic oligonucleotide"
  source 1..23: mol_type = other RNA
tctgtagaaaggcatgaagcatt

SEQ ID NO: 1281 - DNA, 21 bp, synthetic construct
  misc_feature 1..21: note = source = /note="Description of Artificial Sequence: Synthetic oligonucleotide"
  misc_feature 1..21: note = source = /note="Description of Combined DNA/RNA Molecule: Synthetic oligonucleotide"
  source 1..21: mol_type = other DNA
tgcttcatgcctttctacaga

SEQ ID NO: 1282 - RNA, 23 nt, synthetic construct
  misc_feature 1..23: note = source = /note="Description of Artificial Sequence: Synthetic oligonucleotide"
  source 1..23: mol_type = other RNA
tctgtagaaaggcatgaagcatt

SEQ ID NO: 1283 - DNA, 21 bp, synthetic construct
  misc_feature 1..21: note = source = /note="Description of Artificial Sequence: Synthetic oligonucleotide"
  misc_feature 1..21: note = source = /note="Description of Combined DNA/RNA Molecule: Synthetic oligonucleotide"
  source 1..21: mol_type = other DNA
tgcttcatgcctttctacaga

SEQ ID NO: 1284 - RNA, 23 nt, synthetic construct
  misc_feature 1..23: note = source = /note="Description of Artificial Sequence: Synthetic oligonucleotide"
  source 1..23: mol_type = other RNA
tctgtagaaaggcatgaagcatt

SEQ ID NO: 1285 - DNA, 21 bp, synthetic construct
  misc_feature 1..21: note = source = /note="Description of Artificial Sequence: Synthetic oligonucleotide"
  misc_feature 1..21: note = source = /note="Description of Combined DNA/RNA Molecule: Synthetic oligonucleotide"
  source 1..21: mol_type = other DNA
tgcttcatgcctttctacaga

SEQ ID NO: 1286 - RNA, 23 nt, synthetic construct
  modified_base 2: mod_base = OTHER; note = Abasic nucleotide
  misc_feature 1..23: note = source = /note="Description of Artificial Sequence: Synthetic oligonucleotide"
  source 1..23: mol_type = other RNA
tntgtagaaaggcatgaagcatt

SEQ ID NO: 1287 - DNA, 21 bp, synthetic construct
  misc_feature 1..21: note = source = /note="Description of Artificial Sequence: Synthetic oligonucleotide"
  misc_feature 1..21: note = source = /note="Description of Combined DNA/RNA Molecule: Synthetic oligonucleotide"
  source 1..21: mol_type = other DNA
tgcttcatgcctttctacaga

SEQ ID NO: 1288 - RNA, 23 nt, synthetic construct
  modified_base 3: mod_base = OTHER; note = Abasic nucleotide
  misc_feature 1..23: note = source = /note="Description of Artificial Sequence: Synthetic oligonucleotide"
  source 1..23: mol_type = other RNA
tcngtagaaaggcatgaagcatt

SEQ ID NO: 1289 - RNA, 21 nt, synthetic construct
  modified_base 21: mod_base = OTHER; note = Inverted abasic nucleotide
  misc_feature 1..21: note = source = /note="Description of Artificial Sequence: Synthetic oligonucleotide"
  source 1..21: mol_type = other RNA
tcatgcctttctacagtggcn

SEQ ID NO: 1290 - RNA, 23 nt, synthetic construct
  modified_base 6: mod_base = OTHER; note = Abasic nucleotide
  misc_feature 1..23: note = source = /note="Description of Artificial Sequence: Synthetic oligonucleotide"
  source 1..23: mol_type = other RNA
agccantgtagaaaggcatgatt

SEQ ID NO: 1291 - DNA, 21 bp, synthetic construct
  modified_base 21: mod_base = OTHER; note = Inverted abasic nucleotide
  misc_feature 1..21: note = source = /note="Description of Artificial Sequence: Synthetic oligonucleotide"
  misc_feature 1..21: note = source = /note="Description of Combined DNA/RNA Molecule: Synthetic oligonucleotide"
  source 1..21: mol_type = other DNA
tcatgcctttctacagtggcn

SEQ ID NO: 1292 - RNA, 23 nt, synthetic construct
  modified_base 6: mod_base = OTHER; note = Abasic nucleotide
  misc_feature 1..23: note = source = /note="Description of Artificial Sequence: Synthetic oligonucleotide"
  source 1..23: mol_type = other RNA
agccantgtagaaaggcatgatt

SEQ ID NO: 1293 - RNA, 21 nt, synthetic construct
  modified_base 21: mod_base = OTHER; note = Inverted abasic nucleotide
  misc_feature 1..21: note = source = /note="Description of Artificial Sequence: Synthetic oligonucleotide"
  source 1..21: mol_type = other RNA
tcatgcctttctacagtggcn

SEQ ID NO: 1294 - RNA, 23 nt, synthetic construct
  modified_base 6: mod_base = OTHER; note = Abasic nucleotide
  misc_feature 1..23: note = source = /note="Description of Artificial Sequence: Synthetic oligonucleotide"
  source 1..23: mol_type = other RNA
agccantgtagaaaggcatgatt

SEQ ID NO: 1295 - RNA, 21 nt, synthetic construct
  misc_feature 1..21: note = source = /note="Description of Artificial Sequence: Synthetic oligonucleotide"
  source 1..21: mol_type = other RNA
ggaaagactgttccaaaaatt

SEQ ID NO: 1296 - RNA, 21 nt, synthetic construct
  misc_feature 1..21: note = source = /note="Description of Artificial Sequence: Synthetic oligonucleotide"
  source 1..21: mol_type = other RNA
tttttggaacagtctttcctt

SEQ ID NO: 1297 - RNA, 21 nt, synthetic construct
  misc_feature 1..21: note = source = /note="Description of Artificial Sequence: Synthetic oligonucleotide"
  source 1..21: mol_type = other RNA
ggtatgttcctgcttcatgtt

SEQ ID NO: 1298 - RNA, 21 nt, synthetic construct
  misc_feature 1..21: note = source = /note="Description of Artificial Sequence: Synthetic oligonucleotide"
  source 1..21: mol_type = other RNA
catgaagcaggaacatacctt

SEQ ID NO: 1299 - RNA, 21 nt, synthetic construct
  misc_feature 1..21: note = source = /note="Description of Artificial Sequence: Synthetic oligonucleotide"
  source 1..21: mol_type = other RNA
gtatgttcctgcttcatgctt

SEQ ID NO: 1300 - RNA, 21 nt, synthetic construct
  misc_feature 1..21: note = source = /note="Description of Artificial Sequence: Synthetic oligonucleotide"
  source 1..21: mol_type = other RNA
gcatgaagcaggaacatactt

SEQ ID NO: 1301 - RNA, 21 nt, synthetic construct
  misc_feature 1..21: note = source = /note="Description of Artificial Sequence: Synthetic oligonucleotide"
  source 1..21: mol_type = other RNA
tgttcctgcttcatgcccttt

SEQ ID NO: 1302 - RNA, 21 nt, synthetic construct
  misc_feature 1..21: note = source = /note="Description of Artificial Sequence: Synthetic oligonucleotide"
  source 1..21: mol_type = other RNA
agggcatgaagcaggaacatt

SEQ ID NO: 1303 - RNA, 21 nt, synthetic construct
  misc_feature 1..21: note = source = /note="Description of Artificial Sequence: Synthetic oligonucleotide"
  source 1..21: mol_type = other RNA
gcttcatgcccttctacagtt

SEQ ID NO: 1304 - RNA, 21 nt, synthetic construct
  misc_feature 1..21: note = source = /note="Description of Artificial Sequence: Synthetic oligonucleotide"
  source 1..21: mol_type = other RNA
ctgtagaagggcatgaagctt

SEQ ID NO: 1305 - RNA, 21 nt, synthetic construct
  misc_feature 1..21: note = source = /note="Description of Artificial Sequence: Synthetic oligonucleotide"
  source 1..21: mol_type = other RNA
cttcatgcccttctacagttt

SEQ ID NO: 1306 - RNA, 21 nt, synthetic construct
  misc_feature 1..21: note = source = /note="Description of Artificial Sequence: Synthetic oligonucleotide"
  source 1..21: mol_type = other RNA
actgtagaagggcatgaagtt

SEQ ID NO: 1307 - RNA, 21 nt, synthetic construct
  misc_feature 1..21: note = source = /note="Description of Artificial Sequence: Synthetic oligonucleotide"
  source 1..21: mol_type = other RNA
gcggcttcctgggcttctatt

SEQ ID NO: 1308 - RNA, 21 nt, synthetic construct
  misc_feature 1..21: note = source = /note="Description of Artificial Sequence: Synthetic oligonucleotide"
  source 1..21: mol_type = other RNA
tagaagcccaggaagccgctt

SEQ ID NO: 1309 - RNA, 21 nt, synthetic construct
  misc_feature 1..21: note = source = /note="Description of Artificial Sequence: Synthetic oligonucleotide"
  source 1..21: mol_type = other RNA
gttcctgcttcatgccctttt

SEQ ID NO: 1310 - RNA, 21 nt, synthetic construct
  misc_feature 1..21: note = source = /note="Description of Artificial Sequence: Synthetic oligonucleotide"
  source 1..21: mol_type = other RNA
aagggcatgaagcaggaactt

SEQ ID NO: 1311 - RNA, 21 nt, synthetic construct
  misc_feature 1..21: note = source = /note="Description of Artificial Sequence: Synthetic oligonucleotide"
  source 1..21: mol_type = other RNA
atggcttccagatatgccttt

SEQ ID NO: 1312 - RNA, 21 nt, synthetic construct
  misc_feature 1..21: note = source = /note="Description of Artificial Sequence: Synthetic oligonucleotide"
  source 1..21: mol_type = other RNA
aggcatatctggaagccattt

SEQ ID NO: 1313 - RNA, 21 nt, synthetic construct
  misc_feature 1..21: note = source = /note="Description of Artificial Sequence: Synthetic oligonucleotide"
  source 1..21: mol_type = other RNA
cctgcttcatgcccttctatt

SEQ ID NO: 1314 - RNA, 21 nt, synthetic construct
  misc_feature 1..21: note = source = /note="Description of Artificial Sequence: Synthetic oligonucleotide"
  source 1..21: mol_type = other RNA
tagaagggcatgaagcaggtt

SEQ ID NO: 1315 - RNA, 21 nt, synthetic construct
  misc_feature 1..21: note = source = /note="Description of Artificial Sequence: Synthetic oligonucleotide"
  source 1..21: mol_type = other RNA
ttcatgcccttctacagtttt

SEQ ID NO: 1316 - RNA, 21 nt, synthetic construct
  misc_feature 1..21: note = source = /note="Description of Artificial Sequence: Synthetic oligonucleotide"
  source 1..21: mol_type = other RNA
aactgtagaagggcatgaatt

SEQ ID NO: 1317 - RNA, 21 nt, synthetic construct
  misc_feature 1..21: note = source = /note="Description of Artificial Sequence: Synthetic oligonucleotide"
  source 1..21: mol_type = other RNA
ttcatgcccttctacagtgtt

SEQ ID NO: 1318 - RNA, 21 nt, synthetic construct
  misc_feature 1..21: note = source = /note="Description of Artificial Sequence: Synthetic oligonucleotide"
  source 1..21: mol_type = other RNA
cactgtagaagggcatgaatt

SEQ ID NO: 1319 - RNA, 21 nt, synthetic construct
  misc_feature 1..21: note = source = /note="Description of Artificial Sequence: Synthetic oligonucleotide"
  source 1..21: mol_type = other RNA
gcttcatgcccttctacattt

SEQ ID NO: 1320 - RNA, 21 nt, synthetic construct
  misc_feature 1..21: note = source = /note="Description of Artificial Sequence: Synthetic oligonucleotide"
  source 1..21: mol_type = other RNA
atgtagaagggcatgaagctt

SEQ ID NO: 1321 - RNA, 21 nt, synthetic construct
  misc_feature 1..21: note = source = /note="Description of Artificial Sequence: Synthetic oligonucleotide"
  source 1..21: mol_type = other RNA
ggtccagcctgaacttctttt

SEQ ID NO: 1322 - RNA, 21 nt, synthetic construct
  misc_feature 1..21: note = source = /note="Description of Artificial Sequence: Synthetic oligonucleotide"
  source 1..21: mol_type = other RNA
aagaagttcaggctggacctt

SEQ ID NO: 1323 - RNA, 21 nt, synthetic construct
  misc_feature 1..21: note = source = /note="Description of Artificial Sequence: Synthetic oligonucleotide"
  source 1..21: mol_type = other RNA
gcggcttcctgggcttctatt

SEQ ID NO: 1324 - RNA, 21 nt, synthetic construct
  misc_feature 1..21: note = source = /note="Description of Artificial Sequence: Synthetic oligonucleotide"
  source 1..21: mol_type = other RNA
tagaagcccaggaagccgctt

SEQ ID NO: 1325 - RNA, 21 nt, synthetic construct
  misc_feature 1..21: note = source = /note="Description of Artificial Sequence: Synthetic oligonucleotide"
  source 1..21: mol_type = other RNA
gcggcttcctgggcttctatt

SEQ ID NO: 1326 - RNA, 21 nt, synthetic construct
  misc_feature 1..21: note = source = /note="Description of Artificial Sequence: Synthetic oligonucleotide"
  source 1..21: mol_type = other RNA
tagaagcccaggaagccgctt

SEQ ID NO: 1327 - RNA, 21 nt, synthetic construct
  misc_feature 1..21: note = source = /note="Description of Artificial Sequence: Synthetic oligonucleotide"
  source 1..21: mol_type = other RNA
gttcctgcttcatgccctttt

SEQ ID NO: 1328 - RNA, 21 nt, synthetic construct
  misc_feature 1..21: note = source = /note="Description of Artificial Sequence: Synthetic oligonucleotide"
  source 1..21: mol_type = other RNA
aagggcatgaagcaggaactt

SEQ ID NO: 1329 - RNA, 21 nt, synthetic construct
  misc_feature 1..21: note = source = /note="Description of Artificial Sequence: Synthetic oligonucleotide"
  source 1..21: mol_type = other RNA
gttcctgcttcatgccctttt

SEQ ID NO: 1330 - RNA, 21 nt, synthetic construct
  misc_feature 1..21: note = source = /note="Description of Artificial Sequence: Synthetic oligonucleotide"
  source 1..21: mol_type = other RNA
aagggcatgaagcaggaactt

SEQ ID NO: 1331 - RNA, 21 nt, synthetic construct
  misc_feature 1..21: note = source = /note="Description of Artificial Sequence: Synthetic oligonucleotide"
  source 1..21: mol_type = other RNA
cctgcttcatgcccttctatt

SEQ ID NO: 1332 - RNA, 21 nt, synthetic construct
  misc_feature 1..21: note = source = /note="Description of Artificial Sequence: Synthetic oligonucleotide"
  source 1..21: mol_type = other RNA
tagaagggcatgaagcaggtt

SEQ ID NO: 1333 - RNA, 21 nt, synthetic construct
  misc_feature 1..21: note = source = /note="Description of Artificial Sequence: Synthetic oligonucleotide"
  source 1..21: mol_type = other RNA
cctgcttcatgcccttctatt

SEQ ID NO: 1334 - RNA, 21 nt, synthetic construct
  misc_feature 1..21: note = source = /note="Description of Artificial Sequence: Synthetic oligonucleotide"
  source 1..21: mol_type = other RNA
tagaagggcatgaagcaggtt

SEQ ID NO: 1335 - RNA, 21 nt, synthetic construct
  misc_feature 1..21: note = source = /note="Description of Artificial Sequence: Synthetic oligonucleotide"
  source 1..21: mol_type = other RNA
atgcccttctacagtggcctt

SEQ ID NO: 1336 - RNA, 21 nt, synthetic construct
  misc_feature 1..21: note = source = /note="Description of Artificial Sequence: Synthetic oligonucleotide"
  source 1..21: mol_type = other RNA
ggccactgtagaagggcattt

SEQ ID NO: 1337 - RNA, 21 nt, synthetic construct
  misc_feature 1..21: note = source = /note="Description of Artificial Sequence: Synthetic oligonucleotide"
  source 1..21: mol_type = other RNA
atggcttccagatatgccttt

SEQ ID NO: 1338 - RNA, 21 nt, synthetic construct
  misc_feature 1..21: note = source = /note="Description of Artificial Sequence: Synthetic oligonucleotide"
  source 1..21: mol_type = other RNA
aggcatatctggaagccattt

SEQ ID NO: 1339 - RNA, 21 nt, synthetic construct
  misc_feature 1..21: note = source = /note="Description of Artificial Sequence: Synthetic oligonucleotide"
  source 1..21: mol_type = other RNA
gtgacaacgtacccttcattt

SEQ ID NO: 1340 - RNA, 21 nt, synthetic construct
  misc_feature 1..21: note = source = /note="Description of Artificial Sequence: Synthetic oligonucleotide"
  source 1..21: mol_type = other RNA
atgaagggtacgttgtcactt

SEQ ID NO: 1341 - RNA, 21 nt, synthetic construct
  misc_feature 1..21: note = source = /note="Description of Artificial Sequence: Synthetic oligonucleotide"
  source 1..21: mol_type = other RNA
gtatgttcctgcttcatgctt

SEQ ID NO: 1342 - RNA, 21 nt, synthetic construct
  misc_feature 1..21: note = source = /note="Description of Artificial Sequence: Synthetic oligonucleotide"
  source 1..21: mol_type = other RNA
gcatgaagcaggaacatactt

SEQ ID NO: 1343 - RNA, 21 nt, synthetic construct
  misc_feature 1..21: note = source = /note="Description of Artificial Sequence: Synthetic oligonucleotide"
  source 1..21: mol_type = other RNA
gtatgttcctgcttcatgctt

SEQ ID NO: 1344 - RNA, 21 nt, synthetic construct
  misc_feature 1..21: note = source = /note="Description of Artificial Sequence: Synthetic oligonucleotide"
  source 1..21: mol_type = other RNA
gcatgaagcaggaacatactt

SEQ ID NO: 1345 - RNA, 21 nt, synthetic construct
  misc_feature 1..21: note = source = /note="Description of Artificial Sequence: Synthetic oligonucleotide"
  source 1..21: mol_type = other RNA
gtatgttcctgcttcatgctt

SEQ ID NO: 1346 - RNA, 21 nt, synthetic construct
  misc_feature 1..21: note = source = /note="Description of Artificial Sequence: Synthetic oligonucleotide"
  source 1..21: mol_type = other RNA
gcatgaagcaggaacatactt

SEQ ID NO: 1347 - RNA, 21 nt, synthetic construct
  misc_feature 1..21: note = source = /note="Description of Artificial Sequence: Synthetic oligonucleotide"
  source 1..21: mol_type = other RNA
gtatgttcctgcttcatgcct

SEQ ID NO: 1348 - RNA, 23 nt, synthetic construct
  misc_feature 1..23: note = source = /note="Description of Artificial Sequence: Synthetic oligonucleotide"
  source 1..23: mol_type = other RNA
aggcatgaagcaggaacatactt

SEQ ID NO: 1349 - RNA, 21 nt, synthetic construct
  misc_feature 1..21: note = source = /note="Description of Artificial Sequence: Synthetic oligonucleotide"
  source 1..21: mol_type = other RNA
tggtatgttcctgcttcatgt

SEQ ID NO: 1350 - RNA, 23 nt, synthetic construct
  misc_feature 1..23: note = source = /note="Description of Artificial Sequence: Synthetic oligonucleotide"
  source 1..23: mol_type = other RNA
gcatgaagcaggaacataccatt

SEQ ID NO: 1351 - RNA, 19 nt, synthetic construct
  misc_feature 1..19: note = source = /note="Description of Artificial Sequence: Synthetic oligonucleotide"
  source 1..19: mol_type = other RNA
gtatgttcctgcttcatgt

SEQ ID NO: 1352 - RNA, 21 nt, synthetic construct
  misc_feature 1..21: note = source = /note="Description of Artificial Sequence: Synthetic oligonucleotide"
  source 1..21: mol_type = other RNA
gcatgaagcaggaacatactt

SEQ ID NO: 1353 - RNA, 20 nt, synthetic construct
  modified_base 20: mod_base = OTHER; note = Inverted abasic nucleotide
  misc_feature 1..20: note = source = /note="Description of Artificial Sequence: Synthetic oligonucleotide"
  source 1..20: mol_type = other RNA
gtatgttcctgcttcatgcn

SEQ ID NO: 1354 - RNA, 21 nt, synthetic construct
  misc_feature 1..21: note = source = /note="Description of Artificial Sequence: Synthetic oligonucleotide"
  source 1..21: mol_type = other RNA
gcatgaagcaggaacatactt

SEQ ID NO: 1355 - RNA, 21 nt, synthetic construct
  misc_feature 1..21: note = source = /note="Description of Artificial Sequence: Synthetic oligonucleotide"
  source 1..21: mol_type = other RNA
gcttcatgcccttctacattt

SEQ ID NO: 1356 - RNA, 21 nt, synthetic construct
  misc_feature 1..21: note = source = /note="Description of Artificial Sequence: Synthetic oligonucleotide"
  source 1..21: mol_type = other RNA
atgtagaagggcatgaagctt

SEQ ID NO: 1357 - RNA, 21 nt, synthetic construct
  misc_feature 1..21: note = source = /note="Description of Artificial Sequence: Synthetic oligonucleotide"
  source 1..21: mol_type = other RNA
gcttcatgcccttctacattt

SEQ ID NO: 1358 - RNA, 21 nt, synthetic construct
  misc_feature 1..21: note = source = /note="Description of Artificial Sequence: Synthetic oligonucleotide"
  source 1..21: mol_type = other RNA
atgtagaagggcatgaagctt

SEQ ID NO: 1359 - RNA, 21 nt, synthetic construct
  misc_feature 1..21: note = source = /note="Description of Artificial Sequence: Synthetic oligonucleotide"
  source 1..21: mol_type = other RNA
gcttcatgcccttctacattt

SEQ ID NO: 1360 - RNA, 21 nt, synthetic construct
  misc_feature 1..21: note = source = /note="Description of Artificial Sequence: Synthetic oligonucleotide"
  source 1..21: mol_type = other RNA
atgtagaagggcatgaagctt

SEQ ID NO: 1361 - RNA, 21 nt, synthetic construct
  misc_feature 1..21: note = source = /note="Description of Artificial Sequence: Synthetic oligonucleotide"
  source 1..21: mol_type = other RNA
gcttcatgcccttctacattt

SEQ ID NO: 1362 - RNA, 21 nt, synthetic construct
  misc_feature 1..21: note = source = /note="Description of Artificial Sequence: Synthetic oligonucleotide"
  source 1..21: mol_type = other RNA
atgtagaagggcatgaagctt

SEQ ID NO: 1363 - RNA, 21 nt, synthetic construct
  misc_feature 1..21: note = source = /note="Description of Artificial Sequence: Synthetic oligonucleotide"
  source 1..21: mol_type = other RNA
gcttcatgcccttctacattt

SEQ ID NO: 1364 - RNA, 21 nt, synthetic construct
  misc_feature 1..21: note = source = /note="Description of Artificial Sequence: Synthetic oligonucleotide"
  source 1..21: mol_type = other RNA
atgtagaagggcatgaagctt

SEQ ID NO: 1365 - RNA, 21 nt, synthetic construct
  misc_feature 1..21: note = source = /note="Description of Artificial Sequence: Synthetic oligonucleotide"
  source 1..21: mol_type = other RNA
gcttcatgcccttctacattt

SEQ ID NO: 1366 - RNA, 21 nt, synthetic construct
  misc_feature 1..21: note = source = /note="Description of Artificial Sequence: Synthetic oligonucleotide"
  source 1..21: mol_type = other RNA
atgtagaagggcatgaagctt

SEQ ID NO: 1367 - RNA, 21 nt, synthetic construct
  misc_feature 1..21: note = source = /note="Description of Artificial Sequence: Synthetic oligonucleotide"
  source 1..21: mol_type = other RNA
gcttcatgcccttctacattt

SEQ ID NO: 1368 - RNA, 21 nt, synthetic construct
  misc_feature 1..21: note = source = /note="Description of Artificial Sequence: Synthetic oligonucleotide"
  source 1..21: mol_type = other RNA
atgtagaagggcatgaagctt

SEQ ID NO: 1369 - RNA, 21 nt, synthetic construct
  misc_feature 1..21: note = source = /note="Description of Artificial Sequence: Synthetic oligonucleotide"
  source 1..21: mol_type = other RNA
gcttcatgcccttctacattt

SEQ ID NO: 1370 - RNA, 21 nt, synthetic construct
  misc_feature 1..21: note = source = /note="Description of Artificial Sequence: Synthetic oligonucleotide"
  source 1..21: mol_type = other RNA
atgtagaagggcatgaagctt

SEQ ID NO: 1371 - RNA, 21 nt, synthetic construct
  misc_feature 1..21: note = source = /note="Description of Artificial Sequence: Synthetic oligonucleotide"
  source 1..21: mol_type = other RNA
gcttcatgcccttctacattt

SEQ ID NO: 1372 - RNA, 21 nt, synthetic construct
  misc_feature 1..21: note = source = /note="Description of Artificial Sequence: Synthetic oligonucleotide"
  source 1..21: mol_type = other RNA
atgtagaagggcatgaagctt

SEQ ID NO: 1373 - RNA, 21 nt, synthetic construct
  misc_feature 1..21: note = source = /note="Description of Artificial Sequence: Synthetic oligonucleotide"
  source 1..21: mol_type = other RNA
gcttcatgcccttctacattt

SEQ ID NO: 1374 - RNA, 21 nt, synthetic construct
  misc_feature 1..21: note = source = /note="Description of Artificial Sequence: Synthetic oligonucleotide"
  source 1..21: mol_type = other RNA
atgtagaagggcatgaagctt

SEQ ID NO: 1375 - RNA, 21 nt, synthetic construct
  misc_feature 1..21: note = source = /note="Description of Artificial Sequence: Synthetic oligonucleotide"
  source 1..21: mol_type = other RNA
gcttcatgcccttctacattt

SEQ ID NO: 1376 - RNA, 21 nt, synthetic construct
  misc_feature 1..21: note = source = /note="Description of Artificial Sequence: Synthetic oligonucleotide"
  source 1..21: mol_type = other RNA
atgtagaagggcatgaagctt

SEQ ID NO: 1377 - RNA, 21 nt, synthetic construct
  misc_feature 1..21: note = source = /note="Description of Artificial Sequence: Synthetic oligonucleotide"
  source 1..21: mol_type = other RNA
gcttcatgcccttctacattt

SEQ ID NO: 1378 - RNA, 21 nt, synthetic construct
  misc_feature 1..21: note = source = /note="Description of Artificial Sequence: Synthetic oligonucleotide"
  source 1..21: mol_type = other RNA
atgtagaagggcatgaagctt

SEQ ID NO: 1379 - RNA, 21 nt, synthetic construct
  misc_feature 1..21: note = source = /note="Description of Artificial Sequence: Synthetic oligonucleotide"
  source 1..21: mol_type = other RNA
gcttcatgcccttctacattt

SEQ ID NO: 1380 - RNA, 21 nt, synthetic construct
  misc_feature 1..21: note = source = /note="Description of Artificial Sequence: Synthetic oligonucleotide"
  source 1..21: mol_type = other RNA
atgtagaagggcatgaagctt

SEQ ID NO: 1381 - RNA, 21 nt, synthetic construct
  misc_feature 1..21: note = source = /note="Description of Artificial Sequence: Synthetic oligonucleotide"
  source 1..21: mol_type = other RNA
gcttcatgcccttctacattt

SEQ ID NO: 1382 - RNA, 21 nt, synthetic construct
  misc_feature 1..21: note = source = /note="Description of Artificial Sequence: Synthetic oligonucleotide"
  source 1..21: mol_type = other RNA
atgtagaagggcatgaagctt

SEQ ID NO: 1383 - RNA, 21 nt, synthetic construct
  misc_feature 1..21: note = source = /note="Description of Artificial Sequence: Synthetic oligonucleotide"
  source 1..21: mol_type = other RNA
gcttcatgcccttctacattt

SEQ ID NO: 1384 - RNA, 21 nt, synthetic construct
  misc_feature 1..21: note = source = /note="Description of Artificial Sequence: Synthetic oligonucleotide"
  source 1..21: mol_type = other RNA
atgtagaagggcatgaagctt

SEQ ID NO: 1385 - RNA, 21 nt, synthetic construct
  misc_feature 1..21: note = source = /note="Description of Artificial Sequence: Synthetic oligonucleotide"
  source 1..21: mol_type = other RNA
gcttcatgcccttctacattt

SEQ ID NO: 1386 - RNA, 21 nt, synthetic construct
  misc_feature 1..21: note = source = /note="Description of Artificial Sequence: Synthetic oligonucleotide"
  source 1..21: mol_type = other RNA
atgtagaagggcatgaagctt

SEQ ID NO: 1387 - DNA, 21 bp, synthetic construct
  misc_feature 1..21: note = source = /note="Description of Artificial Sequence: Synthetic oligonucleotide"
  misc_feature 1..21: note = source = /note="Description of Combined DNA/RNA Molecule: Synthetic oligonucleotide"
  source 1..21: mol_type = other DNA
gcttcatgcccttctacattt

SEQ ID NO: 1388 - RNA, 21 nt, synthetic construct
  misc_feature 1..21: note = source = /note="Description of Artificial Sequence: Synthetic oligonucleotide"
  source 1..21: mol_type = other RNA
atgtagaagggcatgaagctt

SEQ ID NO: 1389 - DNA, 21 bp, synthetic construct
  misc_feature 1..21: note = source = /note="Description of Artificial Sequence: Synthetic oligonucleotide"
  misc_feature 1..21: note = source = /note="Description of Combined DNA/RNA Molecule: Synthetic oligonucleotide"
  source 1..21: mol_type = other DNA
gcttcatgcccttctacattt

SEQ ID NO: 1390 - RNA, 21 nt, synthetic construct
  misc_feature 1..21: note = source = /note="Description of Artificial Sequence: Synthetic oligonucleotide"
  source 1..21: mol_type = other RNA
atgtagaagggcatgaagctt

SEQ ID NO: 1391 - DNA, 21 bp, synthetic construct
  misc_feature 1..21: note = source = /note="Description of Artificial Sequence: Synthetic oligonucleotide"
  misc_feature 1..21: note = source = /note="Description of Combined DNA/RNA Molecule: Synthetic oligonucleotide"
  source 1..21: mol_type = other DNA
gcttcatgcccttctacattt

SEQ ID NO: 1392 - RNA, 21 nt, synthetic construct
  misc_feature 1..21: note = source = /note="Description of Artificial Sequence: Synthetic oligonucleotide"
  source 1..21: mol_type = other RNA
atgtagaagggcatgaagctt

SEQ ID NO: 1393 - RNA, 21 nt, synthetic construct
  misc_feature 1..21: note = source = /note="Description of Artificial Sequence: Synthetic oligonucleotide"
  source 1..21: mol_type = other RNA
gcttcatgcccttctacattt

SEQ ID NO: 1394 - RNA, 21 nt, synthetic construct
  misc_feature 1..21: note = source = /note="Description of Artificial Sequence: Synthetic oligonucleotide"
  source 1..21: mol_type = other RNA
atgtagaagggcatgaagctt

SEQ ID NO: 1395 - RNA, 21 nt, synthetic construct
  misc_feature 1..21: note = source = /note="Description of Artificial Sequence: Synthetic oligonucleotide"
  source 1..21: mol_type = other RNA
gcttcatgcccttctacattt

SEQ ID NO: 1396 - RNA, 21 nt, synthetic construct
  misc_feature 1..21: note = source = /note="Description of Artificial Sequence: Synthetic oligonucleotide"
  source 1..21: mol_type = other RNA
atgtagaagggcatgaagctt

SEQ ID NO: 1397 - RNA, 21 nt, synthetic construct
  misc_feature 1..21: note = source = /note="Description of Artificial Sequence: Synthetic oligonucleotide"
  source 1..21: mol_type = other RNA
gcttcatgcccttctacattt

SEQ ID NO: 1398 - RNA, 21 nt, synthetic construct
  misc_feature 1..21: note = source = /note="Description of Artificial Sequence: Synthetic oligonucleotide"
  source 1..21: mol_type = other RNA
atgtagaagggcatgaagctt

SEQ ID NO: 1399 - RNA, 21 nt, synthetic construct
  misc_feature 1..21: note = source = /note="Description of Artificial Sequence: Synthetic oligonucleotide"
  source 1..21: mol_type = other RNA
gcttcatgcccttctacattt

SEQ ID NO: 1400 - RNA, 21 nt, synthetic construct
  misc_feature 1..21: note = source = /note="Description of Artificial Sequence: Synthetic oligonucleotide"
  source 1..21: mol_type = other RNA
atgtagaagggcatgaagctt

SEQ ID NO: 1401 - RNA, 21 nt, synthetic construct
  misc_feature 1..21: note = source = /note="Description of Artificial Sequence: Synthetic oligonucleotide"
  source 1..21: mol_type = other RNA
gcttcatgcccttctacattt

SEQ ID NO: 1402 - RNA, 21 nt, synthetic construct
  misc_feature 1..21: note = source = /note="Description of Artificial Sequence: Synthetic oligonucleotide"
  source 1..21: mol_type = other RNA
atgtagaagggcatgaagctt

SEQ ID NO: 1403 - RNA, 21 nt, synthetic construct
  misc_feature 1..21: note = source = /note="Description of Artificial Sequence: Synthetic oligonucleotide"
  source 1..21: mol_type = other RNA
gcttcatgcccttctacagtt

SEQ ID NO: 1404 - RNA, 23 nt, synthetic construct
  misc_feature 1..23: note = source = /note="Description of Artificial Sequence: Synthetic oligonucleotide"
  source 1..23: mol_type = other RNA
aactgtagaagggcatgaagctt

SEQ ID NO: 1405 - RNA, 21 nt, synthetic construct
  misc_feature 1..21: note = source = /note="Description of Artificial Sequence: Synthetic oligonucleotide"
  source 1..21: mol_type = other RNA
ctgcttcatgcccttctacat

SEQ ID NO: 1406 - RNA, 23 nt, synthetic construct
  misc_feature 1..23: note = source = /note="Description of Artificial Sequence: Synthetic oligonucleotide"
  source 1..23: mol_type = other RNA
atgtagaagggcatgaagcagtt

SEQ ID NO: 1407 - RNA, 19 nt, synthetic construct
  misc_feature 1..19: note = source = /note="Description of Artificial Sequence: Synthetic oligonucleotide"
  source 1..19: mol_type = other RNA
gcttcatgcccttctacat

SEQ ID NO: 1408 - RNA, 21 nt, synthetic construct
  misc_feature 1..21: note = source = /note="Description of Artificial Sequence: Synthetic oligonucleotide"
  source 1..21: mol_type = other RNA
atgtagaagggcatgaagctt

SEQ ID NO: 1409 - RNA, 20 nt, synthetic construct
  modified_base 20: mod_base = OTHER; note = Inverted abasic nucleotide
  misc_feature 1..20: note = source = /note="Description of Artificial Sequence: Synthetic oligonucleotide"
  source 1..20: mol_type = other RNA
gcttcatgcccttctacatn

SEQ ID NO: 1410 - RNA, 21 nt, synthetic construct
  misc_feature 1..21: note = source = /note="Description of Artificial Sequence: Synthetic oligonucleotide"
  source 1..21: mol_type = other RNA
atgtagaagggcatgaagctt

SEQ ID NO: 1411 - RNA, 22 nt, synthetic construct
  modified_base 22: mod_base = OTHER; note = Inverted abasic nucleotide
  misc_feature 1..22: note = source = /note="Description of Artificial Sequence: Synthetic oligonucleotide"
  source 1..22: mol_type = other RNA
gcttcatgcccttctacatttn

SEQ ID NO: 1412 - RNA, 21 nt, synthetic construct
  misc_feature 1..21: note = source = /note="Description of Artificial Sequence: Synthetic oligonucleotide"
  source 1..21: mol_type = other RNA
atgtagaagggcatgaagctt

SEQ ID NO: 1413 - RNA, 21 nt, synthetic construct
  misc_feature 1..21: note = source = /note="Description of Artificial Sequence: Synthetic oligonucleotide"
  source 1..21: mol_type = other RNA
gcttcatgcccttctacattt

SEQ ID NO: 1414 - RNA, 21 nt, synthetic construct
  misc_feature 1..21: note = source = /note="Description of Artificial Sequence: Synthetic oligonucleotide"
  source 1..21: mol_type = other RNA
atgtagaagggcatgaagctt

SEQ ID NO: 1415 - RNA, 21 nt, synthetic construct
  misc_feature 1..21: note = source = /note="Description of Artificial Sequence: Synthetic oligonucleotide"
  source 1..21: mol_type = other RNA
gcttcatgcccttctacattt

SEQ ID NO: 1416 - RNA, 21 nt, synthetic construct
  misc_feature 1..21: note = source = /note="Description of Artificial Sequence: Synthetic oligonucleotide"
  source 1..21: mol_type = other RNA
atgtagaagggcatgaagctt

SEQ ID NO: 1417 - RNA, 21 nt, synthetic construct
  misc_feature 1..21: note = source = /note="Description of Artificial Sequence: Synthetic oligonucleotide"
  source 1..21: mol_type = other RNA
gcttcatgcccttctacattt

SEQ ID NO: 1418 - RNA, 21 nt, synthetic construct
  misc_feature 1..21: note = source = /note="Description of Artificial Sequence: Synthetic oligonucleotide"
  source 1..21: mol_type = other RNA
atgtagaagggcatgaagctt

SEQ ID NO: 1419 - RNA, 21 nt, synthetic construct
  misc_feature 1..21: note = source = /note="Description of Artificial Sequence: Synthetic oligonucleotide"
  source 1..21: mol_type = other RNA
gcttcatgcccttctacattt

SEQ ID NO: 1420 - RNA, 21 nt, synthetic construct
  misc_feature 1..21: note = source = /note="Description of Artificial Sequence: Synthetic oligonucleotide"
  source 1..21: mol_type = other RNA
atgtagaagggcatgaagctt

SEQ ID NO: 1421 - RNA, 21 nt, synthetic construct
  misc_feature 1..21: note = source = /note="Description of Artificial Sequence: Synthetic oligonucleotide"
  source 1..21: mol_type = other RNA
gcttcatgcccttctacattt

SEQ ID NO: 1422 - RNA, 21 nt, synthetic construct
  misc_feature 1..21: note = source = /note="Description of Artificial Sequence: Synthetic oligonucleotide"
  source 1..21: mol_type = other RNA
atgtagaagggcatgaagctt

SEQ ID NO: 1423 - RNA, 21 nt, synthetic construct
  misc_feature 1..21: note = source = /note="Description of Artificial Sequence: Synthetic oligonucleotide"
  source 1..21: mol_type = other RNA
gcttcatgcccttctacattt

SEQ ID NO: 1424 - RNA, 21 nt, synthetic construct
  misc_feature 1..21: note = source = /note="Description of Artificial Sequence: Synthetic oligonucleotide"
  source 1..21: mol_type = other RNA
atgtagaagggcatgaagctt

SEQ ID NO: 1425 - RNA, 21 nt, synthetic construct
  misc_feature 1..21: note = source = /note="Description of Artificial Sequence: Synthetic oligonucleotide"
  source 1..21: mol_type = other RNA
gcttcatgcccttctacattt

SEQ ID NO: 1426 - RNA, 21 nt, synthetic construct
  misc_feature 1..21: note = source = /note="Description of Artificial Sequence: Synthetic oligonucleotide"
  source 1..21: mol_type = other RNA
atgtagaagggcatgaagctt

SEQ ID NO: 1427 - RNA, 21 nt, synthetic construct
  misc_feature 1..21: note = source = /note="Description of Artificial Sequence: Synthetic oligonucleotide"
  source 1..21: mol_type = other RNA
gcttcatgcccttctacattt

SEQ ID NO: 1428 - RNA, 21 nt, synthetic construct
  misc_feature 1..21: note = source = /note="Description of Artificial Sequence: Synthetic oligonucleotide"
  source 1..21: mol_type = other RNA
atgtagaagggcatgaagctt

SEQ ID NO: 1429 - RNA, 21 nt, synthetic construct
  misc_feature 1..21: note = source = /note="Description of Artificial Sequence: Synthetic oligonucleotide"
  source 1..21: mol_type = other RNA
gcttcatgcccttctacattt

SEQ ID NO: 1430 - RNA, 21 nt, synthetic construct
  misc_feature 1..21: note = source = /note="Description of Artificial Sequence: Synthetic oligonucleotide"
  source 1..21: mol_type = other RNA
atgtagaagggcatgaagctt

SEQ ID NO: 1431 - RNA, 22 nt, synthetic construct
  modified_base 22: mod_base = OTHER; note = Inverted abasic nucleotide
  misc_feature 1..22: note = source = /note="Description of Artificial Sequence: Synthetic oligonucleotide"
  source 1..22: mol_type = other RNA
gtatgttcctgcttcatgcttn

SEQ ID NO: 1432 - RNA, 21 nt, synthetic construct
  misc_feature 1..21: note = source = /note="Description of Artificial Sequence: Synthetic oligonucleotide"
  source 1..21: mol_type = other RNA
gcatgaagcaggaacatactt

SEQ ID NO: 1433 - RNA, 21 nt, synthetic construct
  misc_feature 1..21: note = source = /note="Description of Artificial Sequence: Synthetic oligonucleotide"
  source 1..21: mol_type = other RNA
ggtatgttcctgcttcatttt

SEQ ID NO: 1434 - RNA, 21 nt, synthetic construct
  misc_feature 1..21: note = source = /note="Description of Artificial Sequence: Synthetic oligonucleotide"
  source 1..21: mol_type = other RNA
aatgaagcaggaacatacctt

SEQ ID NO: 1435 - RNA, 21 nt, synthetic construct
  misc_feature 1..21: note = source = /note="Description of Artificial Sequence: Synthetic oligonucleotide"
  source 1..21: mol_type = other RNA
gtatgttcctgcttcatgttt

SEQ ID NO: 1436 - RNA, 21 nt, synthetic construct
  misc_feature 1..21: note = source = /note="Description of Artificial Sequence: Synthetic oligonucleotide"
  source 1..21: mol_type = other RNA
acatgaagcaggaacatactt

SEQ ID NO: 1437 - RNA, 21 nt, synthetic construct
  misc_feature 1..21: note = source = /note="Description of Artificial Sequence: Synthetic oligonucleotide"
  source 1..21: mol_type = other RNA
cggccaatgtccaccagcttt

SEQ ID NO: 1438 - RNA, 21 nt, synthetic construct
  misc_feature 1..21: note = source = /note="Description of Artificial Sequence: Synthetic oligonucleotide"
  source 1..21: mol_type = other RNA
agctggtggacattggccgtt

SEQ ID NO: 1439 - RNA, 21 nt, synthetic construct
  misc_feature 1..21: note = source = /note="Description of Artificial Sequence: Synthetic oligonucleotide"
  source 1..21: mol_type = other RNA
tggagcagactctgcaggttt

SEQ ID NO: 1440 - RNA, 21 nt, synthetic construct
  misc_feature 1..21: note = source = /note="Description of Artificial Sequence: Synthetic oligonucleotide"
  source 1..21: mol_type = other RNA
acctgcagagtctgctccatt

SEQ ID NO: 1441 - RNA, 21 nt, synthetic construct
  misc_feature 1..21: note = source = /note="Description of Artificial Sequence: Synthetic oligonucleotide"
  source 1..21: mol_type = other RNA
acgtacccttcattgatgttt

SEQ ID NO: 1442 - RNA, 21 nt, synthetic construct
  misc_feature 1..21: note = source = /note="Description of Artificial Sequence: Synthetic oligonucleotide"
  source 1..21: mol_type = other RNA
acatcaatgaagggtacgttt

SEQ ID NO: 1443 - RNA, 21 nt, synthetic construct
  misc_feature 1..21: note = source = /note="Description of Artificial Sequence: Synthetic oligonucleotide"
  source 1..21: mol_type = other RNA
ccagagactggtgacatgttt

SEQ ID NO: 1444 - RNA, 21 nt, synthetic construct
  misc_feature 1..21: note = source = /note="Description of Artificial Sequence: Synthetic oligonucleotide"
  source 1..21: mol_type = other RNA
acatgtcaccagtctctggtt

SEQ ID NO: 1445 - RNA, 22 nt, synthetic construct
  modified_base 1: mod_base = OTHER; note = Inverted abasic nucleotide
  misc_feature 1..22: note = source = /note="Description of Artificial Sequence: Synthetic oligonucleotide"
  source 1..22: mol_type = other RNA
ngcttcatgcctttctacattt

SEQ ID NO: 1446 - RNA, 21 nt, synthetic construct
  misc_feature 1..21: note = source = /note="Description of Artificial Sequence: Synthetic oligonucleotide"
  source 1..21: mol_type = other RNA
atgtagaaaggcatgaagctt

SEQ ID NO: 1447 - RNA, 22 nt, synthetic construct
  modified_base 1: mod_base = OTHER; note = Inverted abasic nucleotide
  misc_feature 1..22: note = source = /note="Description of Artificial Sequence: Synthetic oligonucleotide"
  source 1..22: mol_type = other RNA
ngcttcatgcctttctacattt

SEQ ID NO: 1448 - RNA, 23 nt, synthetic construct
  misc_feature 1..23: note = source = /note="Description of Artificial Sequence: Synthetic oligonucleotide"
  source 1..23: mol_type = other RNA
aaatgtagaaaggcatgaagctt

SEQ ID NO: 1449 - RNA, 22 nt, synthetic construct
  modified_base 1: mod_base = OTHER; note = Inverted abasic nucleotide
  misc_feature 1..22: note = source = /note="Description of Artificial Sequence: Synthetic oligonucleotide"
  source 1..22: mol_type = other RNA
ngcttcatgcctttctacattt

SEQ ID NO: 1450 - RNA, 23 nt, synthetic construct
  misc_feature 1..23: note = source = /note="Description of Artificial Sequence: Synthetic oligonucleotide"
  source 1..23: mol_type = other RNA
aaatgtagaaaggcatgaagctt

SEQ ID NO: 1451 - RNA, 21 nt, synthetic construct
  misc_feature 1..21: note = source = /note="Description of Artificial Sequence: Synthetic oligonucleotide"
  source 1..21: mol_type = other RNA
tgcttcatgcctttctacatt

SEQ ID NO: 1452 - RNA, 21 nt, synthetic construct
  misc_feature 1..21: note = source = /note="Description of Artificial Sequence: Synthetic oligonucleotide"
  source 1..21: mol_type = other RNA
tgtagaaaggcatgaagcatt

SEQ ID NO: 1453 - RNA, 21 nt, synthetic construct
  misc_feature 1..21: note = source = /note="Description of Artificial Sequence: Synthetic oligonucleotide"
  source 1..21: mol_type = other RNA
tatgttcctgcttcatgcttt

SEQ ID NO: 1454 - RNA, 21 nt, synthetic construct
  misc_feature 1..21: note = source = /note="Description of Artificial Sequence: Synthetic oligonucleotide"
  source 1..21: mol_type = other RNA
agcatgaagcaggaacatatt

SEQ ID NO: 1455 - RNA, 21 nt, synthetic construct
  misc_feature 1..21: note = source = /note="Description of Artificial Sequence: Synthetic oligonucleotide"
  source 1..21: mol_type = other RNA
ttcctgcttcatgcctttttt

SEQ ID NO: 1456 - RNA, 21 nt, synthetic construct
  misc_feature 1..21: note = source = /note="Description of Artificial Sequence: Synthetic oligonucleotide"
  source 1..21: mol_type = other RNA
aaaaggcatgaagcaggaatt

SEQ ID NO: 1457 - RNA, 21 nt, synthetic construct
  misc_feature 1..21: note = source = /note="Description of Artificial Sequence: Synthetic oligonucleotide"
  source 1..21: mol_type = other RNA
tcatgcctttctacagtgttt

SEQ ID NO: 1458 - RNA, 21 nt, synthetic construct
  misc_feature 1..21: note = source = /note="Description of Artificial Sequence: Synthetic oligonucleotide"
  source 1..21: mol_type = other RNA
acactgtagaaaggcatgatt

SEQ ID NO: 1459 - RNA, 21 nt, synthetic construct
  misc_feature 1..21: note = source = /note="Description of Artificial Sequence: Synthetic oligonucleotide"
  source 1..21: mol_type = other RNA
catgcctttctacagtggttt

SEQ ID NO: 1460 - RNA, 21 nt, synthetic construct
  misc_feature 1..21: note = source = /note="Description of Artificial Sequence: Synthetic oligonucleotide"
  source 1..21: mol_type = other RNA
accactgtagaaaggcatgtt

SEQ ID NO: 1461 - RNA, 21 nt, synthetic construct
  misc_feature 1..21: note = source = /note="Description of Artificial Sequence: Synthetic oligonucleotide"
  source 1..21: mol_type = other RNA
atgcctttctacagtggcttt

SEQ ID NO: 1462 - RNA, 21 nt, synthetic construct
  misc_feature 1..21: note = source = /note="Description of Artificial Sequence: Synthetic oligonucleotide"
  source 1..21: mol_type = other RNA
agccactgtagaaaggcattt

SEQ ID NO: 1463 - RNA, 21 nt, synthetic construct
  misc_feature 1..21: note = source = /note="Description of Artificial Sequence: Synthetic oligonucleotide"
  source 1..21: mol_type = other RNA
ggtatgttcctgcttcatatt

SEQ ID NO: 1464 - RNA, 21 nt, synthetic construct
  misc_feature 1..21: note = source = /note="Description of Artificial Sequence: Synthetic oligonucleotide"
  source 1..21: mol_type = other RNA
tatgaagcaggaacatacctt

SEQ ID NO: 1465 - RNA, 21 nt, synthetic construct
  misc_feature 1..21: note = source = /note="Description of Artificial Sequence: Synthetic oligonucleotide"
  source 1..21: mol_type = other RNA
gtatgttcctgcttcatgatt

SEQ ID NO: 1466 - RNA, 21 nt, synthetic construct
  misc_feature 1..21: note = source = /note="Description of Artificial Sequence: Synthetic oligonucleotide"
  source 1..21: mol_type = other RNA
tcatgaagcaggaacatactt

SEQ ID NO: 1467 - RNA, 21 nt, synthetic construct
  misc_feature 1..21: note = source = /note="Description of Artificial Sequence: Synthetic oligonucleotide"
  source 1..21: mol_type = other RNA
tatgttcctgcttcatgcatt

SEQ ID NO: 1468 - RNA, 21 nt, synthetic construct
  misc_feature 1..21: note = source = /note="Description of Artificial Sequence: Synthetic oligonucleotide"
  source 1..21: mol_type = other RNA
tgcatgaagcaggaacatatt

SEQ ID NO: 1469 - RNA, 21 nt, synthetic construct
  misc_feature 1..21: note = source = /note="Description of Artificial Sequence: Synthetic oligonucleotide"
  source 1..21: mol_type = other RNA
ttcctgcttcatgcctttatt

SEQ ID NO: 1470 - RNA, 21 nt, synthetic construct
  misc_feature 1..21: note = source = /note="Description of Artificial Sequence: Synthetic oligonucleotide"
  source 1..21: mol_type = other RNA
taaaggcatgaagcaggaatt

SEQ ID NO: 1471 - RNA, 21 nt, synthetic construct
  misc_feature 1..21: note = source = /note="Description of Artificial Sequence: Synthetic oligonucleotide"
  source 1..21: mol_type = other RNA
ctgcttcatgcctttctaatt

SEQ ID NO: 1472 - RNA, 21 nt, synthetic construct
  misc_feature 1..21: note = source = /note="Description of Artificial Sequence: Synthetic oligonucleotide"
  source 1..21: mol_type = other RNA
ttagaaaggcatgaagcagtt

SEQ ID NO: 1473 - RNA, 21 nt, synthetic construct
  misc_feature 1..21: note = source = /note="Description of Artificial Sequence: Synthetic oligonucleotide"
  source 1..21: mol_type = other RNA
gcttcatgcctttctacaatt

SEQ ID NO: 1474 - RNA, 21 nt, synthetic construct
  misc_feature 1..21: note = source = /note="Description of Artificial Sequence: Synthetic oligonucleotide"
  source 1..21: mol_type = other RNA
ttgtagaaaggcatgaagctt

SEQ ID NO: 1475 - RNA, 21 nt, synthetic construct
  misc_feature 1..21: note = source = /note="Description of Artificial Sequence: Synthetic oligonucleotide"
  source 1..21: mol_type = other RNA
ttcatgcctttctacagtatt

SEQ ID NO: 1476 - RNA, 21 nt, synthetic construct
  misc_feature 1..21: note = source = /note="Description of Artificial Sequence: Synthetic oligonucleotide"
  source 1..21: mol_type = other RNA
tactgtagaaaggcatgaatt

SEQ ID NO: 1477 - RNA, 21 nt, synthetic construct
  misc_feature 1..21: note = source = /note="Description of Artificial Sequence: Synthetic oligonucleotide"
  source 1..21: mol_type = other RNA
tcatgcctttctacagtgatt

SEQ ID NO: 1478 - RNA, 21 nt, synthetic construct
  misc_feature 1..21: note = source = /note="Description of Artificial Sequence: Synthetic oligonucleotide"
  source 1..21: mol_type = other RNA
tcactgtagaaaggcatgatt

SEQ ID NO: 1479 - RNA, 21 nt, synthetic construct
  misc_feature 1..21: note = source = /note="Description of Artificial Sequence: Synthetic oligonucleotide"
  source 1..21: mol_type = other RNA
catgcctttctacagtggatt

SEQ ID NO: 1480 - RNA, 21 nt, synthetic construct
  misc_feature 1..21: note = source = /note="Description of Artificial Sequence: Synthetic oligonucleotide"
  source 1..21: mol_type = other RNA
tccactgtagaaaggcatgtt

SEQ ID NO: 1481 - RNA, 21 nt, synthetic construct
  misc_feature 1..21: note = source = /note="Description of Artificial Sequence: Synthetic oligonucleotide"
  source 1..21: mol_type = other RNA
atgcctttctacagtggcatt

SEQ ID NO: 1482 - RNA, 21 nt, synthetic construct
  misc_feature 1..21: note = source = /note="Description of Artificial Sequence: Synthetic oligonucleotide"
  source 1..21: mol_type = other RNA
tgccactgtagaaaggcattt

SEQ ID NO: 1483 - RNA, 21 nt, synthetic construct
  misc_feature 1..21: note = source = /note="Description of Artificial Sequence: Synthetic oligonucleotide"
  source 1..21: mol_type = other RNA
acgtacccttcattgatgatt

SEQ ID NO: 1484 - RNA, 21 nt, synthetic construct
  misc_feature 1..21: note = source = /note="Description of Artificial Sequence: Synthetic oligonucleotide"
  source 1..21: mol_type = other RNA
tcatcaatgaagggtacgttt

SEQ ID NO: 1485 - RNA, 21 nt, synthetic construct
  misc_feature 1..21: note = source = /note="Description of Artificial Sequence: Synthetic oligonucleotide"
  source 1..21: mol_type = other RNA
ccagagactggtgacatgatt

SEQ ID NO: 1486 - RNA, 21 nt, synthetic construct
  misc_feature 1..21: note = source = /note="Description of Artificial Sequence: Synthetic oligonucleotide"
  source 1..21: mol_type = other RNA
tcatgtcaccagtctctggtt

SEQ ID NO: 1487 - RNA, 21 nt, synthetic construct
  misc_feature 1..21: note = source = /note="Description of Artificial Sequence: Synthetic oligonucleotide"
  source 1..21: mol_type = other RNA
atggcttccagatatgccatt

SEQ ID NO: 1488 - RNA, 21 nt, synthetic construct
  misc_feature 1..21: note = source = /note="Description of Artificial Sequence: Synthetic oligonucleotide"
  source 1..21: mol_type = other RNA
tggcatatctggaagccattt

SEQ ID NO: 1489 - RNA, 21 nt, synthetic construct
  misc_feature 1..21: note = source = /note="Description of Artificial Sequence: Synthetic oligonucleotide"
  source 1..21: mol_type = other RNA
gttcctgcttcatgccttttt

SEQ ID NO: 1490 - RNA, 21 nt, synthetic construct
  misc_feature 1..21: note = source = /note="Description of Artificial Sequence: Synthetic oligonucleotide"
  source 1..21: mol_type = other RNA
aaaggcatgaagcaggaactt

SEQ ID NO: 1491 - RNA, 21 nt, synthetic construct
  misc_feature 1..21: note = source = /note="Description of Artificial Sequence: Synthetic oligonucleotide"
  source 1..21: mol_type = other RNA
cctgcttcatgcctttctatt

SEQ ID NO: 1492 - RNA, 21 nt, synthetic construct
  misc_feature 1..21: note = source = /note="Description of Artificial Sequence: Synthetic oligonucleotide"
  source 1..21: mol_type = other RNA
tagaaaggcatgaagcaggtt

SEQ ID NO: 1493 - RNA, 21 nt, synthetic construct
  misc_feature 1..21: note = source = /note="Description of Artificial Sequence: Synthetic oligonucleotide"
  source 1..21: mol_type = other RNA
gcttcatgcctttctacattt

SEQ ID NO: 1494 - RNA, 21 nt, synthetic construct
  misc_feature 1..21: note = source = /note="Description of Artificial Sequence: Synthetic oligonucleotide"
  source 1..21: mol_type = other RNA
atgtagaaaggcatgaagctt

SEQ ID NO: 1495 - RNA, 21 nt, synthetic construct
  misc_feature 1..21: note = source = /note="Description of Artificial Sequence: Synthetic oligonucleotide"
  source 1..21: mol_type = other RNA
cttcatgcctttctacagttt

SEQ ID NO: 1496 - RNA, 21 nt, synthetic construct
  misc_feature 1..21: note = source = /note="Description of Artificial Sequence: Synthetic oligonucleotide"
  source 1..21: mol_type = other RNA
actgtagaaaggcatgaagtt

SEQ ID NO: 1497 - RNA, 21 nt, synthetic construct
  misc_feature 1..21: note = source = /note="Description of Artificial Sequence: Synthetic oligonucleotide"
  source 1..21: mol_type = other RNA
ttcatgcctttctacagtttt

SEQ ID NO: 1498 - RNA, 21 nt, synthetic construct
  misc_feature 1..21: note = source = /note="Description of Artificial Sequence: Synthetic oligonucleotide"
  source 1..21: mol_type = other RNA
aactgtagaaaggcatgaatt

SEQ ID NO: 1499 - RNA, 21 nt, synthetic construct
  misc_feature 1..21: note = source = /note="Description of Artificial Sequence: Synthetic oligonucleotide"
  source 1..21: mol_type = other RNA
gcttcatccctttctacattt

SEQ ID NO: 1500 - RNA, 21 nt, synthetic construct
  misc_feature 1..21: note = source = /note="Description of Artificial Sequence: Synthetic oligonucleotide"
  source 1..21: mol_type = other RNA
atgtagaaagggatgaagctt

SEQ ID NO: 1501 - RNA, 22 nt, synthetic construct
  modified_base 1: mod_base = OTHER; note = Inverted abasic nucleotide
  misc_feature 1..22: note = source = /note="Description of Artificial Sequence: Synthetic oligonucleotide"
  source 1..22: mol_type = other RNA
ngcttcatgcccttctacattt

SEQ ID NO: 1502 - RNA, 21 nt, synthetic construct
  misc_feature 1..21: note = source = /note="Description of Artificial Sequence: Synthetic oligonucleotide"
  source 1..21: mol_type = other RNA
atgtagaagggcatgaagctt

SEQ ID NO: 1503 - RNA, 22 nt, synthetic construct
  modified_base 1: mod_base = OTHER; note = Inverted abasic nucleotide
  misc_feature 1..22: note = source = /note="Description of Artificial Sequence: Synthetic oligonucleotide"
  source 1..22: mol_type = other RNA
ngcttcatgcccttctacattt

SEQ ID NO: 1504 - RNA, 23 nt, synthetic construct
  misc_feature 1..23: note = source = /note="Description of Artificial Sequence: Synthetic oligonucleotide"
  source 1..23: mol_type = other RNA
aaatgtagaagggcatgaagctt

SEQ ID NO: 1505 - RNA, 22 nt, synthetic construct
  modified_base 1: mod_base = OTHER; note = Inverted abasic nucleotide
  misc_feature 1..22: note = source = /note="Description of Artificial Sequence: Synthetic oligonucleotide"
  source 1..22: mol_type = other RNA
ngcttcatgcccttctacattt

SEQ ID NO: 1506 - RNA, 23 nt, synthetic construct
  misc_feature 1..23: note = source = /note="Description of Artificial Sequence: Synthetic oligonucleotide"
  source 1..23: mol_type = other RNA
aaatgtagaagggcatgaagctt

SEQ ID NO: 1507 - RNA, 22 nt, synthetic construct
  modified_base 1: mod_base = OTHER; note = Inverted abasic nucleotide
  misc_feature 1..22: note = source = /note="Description of Artificial Sequence: Synthetic oligonucleotide"
  source 1..22: mol_type = other RNA
ngcggcttcctgggcttctatt

SEQ ID NO: 1508 - RNA, 21 nt, synthetic construct
  misc_feature 1..21: note = source = /note="Description of Artificial Sequence: Synthetic oligonucleotide"
  source 1..21: mol_type = other RNA
tagaagcccaggaagccgctt

SEQ ID NO: 1509 - RNA, 22 nt, synthetic construct
  modified_base 1: mod_base = OTHER; note = Inverted abasic nucleotide
  misc_feature 1..22: note = source = /note="Description of Artificial Sequence: Synthetic oligonucleotide"
  source 1..22: mol_type = other RNA
nctgcggcttcctgggcttcta

SEQ ID NO: 1510 - RNA, 23 nt, synthetic construct
  misc_feature 1..23: note = source = /note="Description of Artificial Sequence: Synthetic oligonucleotide"
  source 1..23: mol_type = other RNA
tagaagcccaggaagccgcagtt

SEQ ID NO: 1511 - RNA, 21 nt, synthetic construct
  modified_base 21: mod_base = OTHER; note = Inverted abasic nucleotide
  misc_feature 1..21: note = source = /note="Description of Artificial Sequence: Synthetic oligonucleotide"
  source 1..21: mol_type = other RNA
ctgcggcttcctgggcttctn

SEQ ID NO: 1512 - RNA, 23 nt, synthetic construct
  misc_feature 1..23: note = source = /note="Description of Artificial Sequence: Synthetic oligonucleotide"
  source 1..23: mol_type = other RNA
tagaagcccaggaagccgcagtt

SEQ ID NO: 1513 - RNA, 22 nt, synthetic construct
  modified_base 1: mod_base = OTHER; note = Inverted abasic nucleotide
  misc_feature 1..22: note = source = /note="Description of Artificial Sequence: Synthetic oligonucleotide"
  source 1..22: mol_type = other RNA
nctgcggcttcctgggcttcta

SEQ ID NO: 1514 - RNA, 23 nt, synthetic construct
  misc_feature 1..23: note = source = /note="Description of Artificial Sequence: Synthetic oligonucleotide"
  source 1..23: mol_type = other RNA
tagaagcccaggaagccgcagtt

SEQ ID NO: 1515 - RNA, 22 nt, synthetic construct
  modified_base 1: mod_base = OTHER; note = Inverted abasic nucleotide
  misc_feature 1..22: note = source = /note="Description of Artificial Sequence: Synthetic oligonucleotide"
  source 1..22: mol_type = other RNA
ngcggcttcctgggcttctatt

SEQ ID NO: 1516 - RNA, 21 nt, synthetic construct
  misc_feature 1..21: note = source = /note="Description of Artificial Sequence: Synthetic oligonucleotide"
  source 1..21: mol_type = other RNA
tagaagcccaggaagccgctt

SEQ ID NO: 1517 - RNA, 21 nt, synthetic construct
  modified_base 21: mod_base = OTHER; note = Inverted abasic nucleotide
  misc_feature 1..21: note = source = /note="Description of Artificial Sequence: Synthetic oligonucleotide"
  source 1..21: mol_type = other RNA
ctgcggcttcctgggcttctn

SEQ ID NO: 1518 - RNA, 23 nt, synthetic construct
  misc_feature 1..23: note = source = /note="Description of Artificial Sequence: Synthetic oligonucleotide"
  source 1..23: mol_type = other RNA
tagaagcccaggaagccgcagtt

SEQ ID NO: 1519 - RNA, 22 nt, synthetic construct
  modified_base 1: mod_base = OTHER; note = Inverted abasic nucleotide
  misc_feature 1..22: note = source = /note="Description of Artificial Sequence: Synthetic oligonucleotide"
  source 1..22: mol_type = other RNA
nctgcggcttcctgggcttcta

SEQ ID NO: 1520 - RNA, 23 nt, synthetic construct
  misc_feature 1..23: note = source = /note="Description of Artificial Sequence: Synthetic oligonucleotide"
  source 1..23: mol_type = other RNA
tagaagcccaggaagccgcagtt

SEQ ID NO: 1521 - RNA, 22 nt, synthetic construct
  modified_base 1: mod_base = OTHER; note = Inverted abasic nucleotide
  misc_feature 1..22: note = source = /note="Description of Artificial Sequence: Synthetic oligonucleotide"
  source 1..22: mol_type = other RNA
ngcggcttcctgggcttctatt

SEQ ID NO: 1522 - RNA, 21 nt, synthetic construct
  misc_feature 1..21: note = source = /note="Description of Artificial Sequence: Synthetic oligonucleotide"
  source 1..21: mol_type = other RNA
tagaagcccaggaagccgctt

SEQ ID NO: 1523 - RNA, 21 nt, synthetic construct
  modified_base 21: mod_base = OTHER; note = Inverted abasic nucleotide
  misc_feature 1..21: note = source = /note="Description of Artificial Sequence: Synthetic oligonucleotide"
  source 1..21: mol_type = other RNA
ctgcggcttcctgggcttctn

SEQ ID NO: 1524 - RNA, 23 nt, synthetic construct
  misc_feature 1..23: note = source = /note="Description of Artificial Sequence: Synthetic oligonucleotide"
  source 1..23: mol_type = other RNA
tagaagcccaggaagccgcagtt

SEQ ID NO: 1525 - RNA, 22 nt, synthetic construct
  modified_base 1: mod_base = OTHER; note = Inverted abasic nucleotide
  misc_feature 1..22: note = source = /note="Description of Artificial Sequence: Synthetic oligonucleotide"
  source 1..22: mol_type = other RNA
nctgcggcttcctgggcttcta

SEQ ID NO: 1526 - RNA, 23 nt, synthetic construct
  misc_feature 1..23: note = source = /note="Description of Artificial Sequence: Synthetic oligonucleotide"
  source 1..23: mol_type = other RNA
tagaagcccaggaagccgcagtt

SEQ ID NO: 1527 - RNA, 22 nt, synthetic construct
  modified_base 1: mod_base = OTHER; note = Inverted abasic nucleotide
  misc_feature 1..22: note = source = /note="Description of Artificial Sequence: Synthetic oligonucleotide"
  source 1..22: mol_type = other RNA
ngcggcttcctgggcttctatt

SEQ ID NO: 1528 - RNA, 21 nt, synthetic construct
  misc_feature 1..21: note = source = /note="Description of Artificial Sequence: Synthetic oligonucleotide"
  source 1..21: mol_type = other RNA
tagaagcccaggaagccgctt

SEQ ID NO: 1529 - RNA, 22 nt, synthetic construct
  modified_base 1: mod_base = OTHER; note = Inverted abasic nucleotide
  misc_feature 1..22: note = source = /note="Description of Artificial Sequence: Synthetic oligonucleotide"
  source 1..22: mol_type = other RNA
nctgcggcttcctgggcttcta

SEQ ID NO: 1530 - RNA, 23 nt, synthetic construct
  misc_feature 1..23: note = source = /note="Description of Artificial Sequence: Synthetic oligonucleotide"
  source 1..23: mol_type = other RNA
tagaagcccaggaagccgcagtt

SEQ ID NO: 1531 - RNA, 22 nt, synthetic construct
  modified_base 1: mod_base = OTHER; note = Inverted abasic nucleotide
  misc_feature 1..22: note = source = /note="Description of Artificial Sequence: Synthetic oligonucleotide"
  source 1..22: mol_type = other RNA
nctgcggcttcctgggcttcta

SEQ ID NO: 1532 - RNA, 23 nt, synthetic construct
  misc_feature 1..23: note = source = /note="Description of Artificial Sequence: Synthetic oligonucleotide"
  source 1..23: mol_type = other RNA
tagaagcccaggaagccgcagtt

SEQ ID NO: 1533 - RNA, 22 nt, synthetic construct
  modified_base 1: mod_base = OTHER; note = Inverted abasic nucleotide
  misc_feature 1..22: note = source = /note="Description of Artificial Sequence: Synthetic oligonucleotide"
  source 1..22: mol_type = other RNA
nctgcggcttcctgggcttcta

SEQ ID NO: 1534 - RNA, 23 nt, synthetic construct
  misc_feature 1..23: note = source = /note="Description of Artificial Sequence: Synthetic oligonucleotide"
  source 1..23: mol_type = other RNA
tagaagcccaggaagccgcagtt

SEQ ID NO: 1535 - RNA, 22 nt, synthetic construct
  modified_base 1: mod_base = OTHER; note = Inverted abasic nucleotide
  misc_feature 1..22: note = source = /note="Description of Artificial Sequence: Synthetic oligonucleotide"
  source 1..22: mol_type = other RNA
natggcttccagatatgccttt

SEQ ID NO: 1536 - RNA, 21 nt, synthetic construct
  misc_feature 1..21: note = source = /note="Description of Artificial Sequence: Synthetic oligonucleotide"
  source 1..21: mol_type = other RNA
aggcatatctggaagccattt

SEQ ID NO: 1537 - RNA, 22 nt, synthetic construct
  modified_base 1: mod_base = OTHER; note = Inverted abasic nucleotide
  misc_feature 1..22: note = source = /note="Description of Artificial Sequence: Synthetic oligonucleotide"
  source 1..22: mol_type = other RNA
nacatggcttccagatatgcct

SEQ ID NO: 1538 - RNA, 23 nt, synthetic construct
  misc_feature 1..23: note = source = /note="Description of Artificial Sequence: Synthetic oligonucleotide"
  source 1..23: mol_type = other RNA
aggcatatctggaagccatgttt

SEQ ID NO: 1539 - RNA, 21 nt, synthetic construct
  modified_base 21: mod_base = OTHER; note = Inverted abasic nucleotide
  misc_feature 1..21: note = source = /note="Description of Artificial Sequence: Synthetic oligonucleotide"
  source 1..21: mol_type = other RNA
acatggcttccagatatgccn

SEQ ID NO: 1540 - RNA, 23 nt, synthetic construct
  misc_feature 1..23: note = source = /note="Description of Artificial Sequence: Synthetic oligonucleotide"
  source 1..23: mol_type = other RNA
aggcatatctggaagccatgttt

SEQ ID NO: 1541 - RNA, 22 nt, synthetic construct
  modified_base 1: mod_base = OTHER; note = Inverted abasic nucleotide
  misc_feature 1..22: note = source = /note="Description of Artificial Sequence: Synthetic oligonucleotide"
  source 1..22: mol_type = other RNA
nacatggcttccagatatgcct

SEQ ID NO: 1542 - RNA, 23 nt, synthetic construct
  misc_feature 1..23: note = source = /note="Description of Artificial Sequence: Synthetic oligonucleotide"
  source 1..23: mol_type = other RNA
aggcatatctggaagccatgttt

SEQ ID NO: 1543 - RNA, 22 nt, synthetic construct
  modified_base 1: mod_base = OTHER; note = Inverted abasic nucleotide
  misc_feature 1..22: note = source = /note="Description of Artificial Sequence: Synthetic oligonucleotide"
  source 1..22: mol_type = other RNA
natggcttccagatatgccttt

SEQ ID NO: 1544 - RNA, 21 nt, synthetic construct
  misc_feature 1..21: note = source = /note="Description of Artificial Sequence: Synthetic oligonucleotide"
  source 1..21: mol_type = other RNA
aggcatatctggaagccattt

SEQ ID NO: 1545 - RNA, 21 nt, synthetic construct
  modified_base 21: mod_base = OTHER; note = Inverted abasic nucleotide
  misc_feature 1..21: note = source = /note="Description of Artificial Sequence: Synthetic oligonucleotide"
  source 1..21: mol_type = other RNA
acatggcttccagatatgccn

SEQ ID NO: 1546 - RNA, 23 nt, synthetic construct
  misc_feature 1..23: note = source = /note="Description of Artificial Sequence: Synthetic oligonucleotide"
  source 1..23: mol_type = other RNA
aggcatatctggaagccatgttt

SEQ ID NO: 1547 - RNA, 22 nt, synthetic construct
  modified_base 1: mod_base = OTHER; note = Inverted abasic nucleotide
  misc_feature 1..22: note = source = /note="Description of Artificial Sequence: Synthetic oligonucleotide"
  source 1..22: mol_type = other RNA
nacatggcttccagatatgcct

SEQ ID NO: 1548 - RNA, 23 nt, synthetic construct
  misc_feature 1..23: note = source = /note="Description of Artificial Sequence: Synthetic oligonucleotide"
  source 1..23: mol_type = other RNA
aggcatatctggaagccatgttt

SEQ ID NO: 1549 - RNA, 22 nt, synthetic construct
  modified_base 1: mod_base = OTHER; note = Inverted abasic nucleotide
  misc_feature 1..22: note = source = /note="Description of Artificial Sequence: Synthetic oligonucleotide"
  source 1..22: mol_type = other RNA
natggcttccagatatgccttt

SEQ ID NO: 1550 - RNA, 21 nt, synthetic construct
  misc_feature 1..21: note = source = /note="Description of Artificial Sequence: Synthetic oligonucleotide"
  source 1..21: mol_type = other RNA
aggcatatctggaagccattt

SEQ ID NO: 1551 - RNA, 21 nt, synthetic construct
  modified_base 21: mod_base = OTHER; note = Inverted abasic nucleotide
  misc_feature 1..21: note = source = /note="Description of Artificial Sequence: Synthetic oligonucleotide"
  source 1..21: mol_type = other RNA
acatggcttccagatatgccn

SEQ ID NO: 1552 - RNA, 23 nt, synthetic construct
  misc_feature 1..23: note = source = /note="Description of Artificial Sequence: Synthetic oligonucleotide"
  source 1..23: mol_type = other RNA
aggcatatctggaagccatgttt

SEQ ID NO: 1553 - RNA, 22 nt, synthetic construct
  modified_base 1: mod_base = OTHER; note = Inverted abasic nucleotide
  misc_feature 1..22: note = source = /note="Description of Artificial Sequence: Synthetic oligonucleotide"
  source 1..22: mol_type = other RNA
nacatggcttccagatatgcct

SEQ ID NO: 1554 - RNA, 23 nt, synthetic construct
  misc_feature 1..23: note = source = /note="Description of Artificial Sequence: Synthetic oligonucleotide"
  source 1..23: mol_type = other RNA
aggcatatctggaagccatgttt

SEQ ID NO: 1555 - RNA, 22 nt, synthetic construct
  modified_base 1: mod_base = OTHER; note = Inverted abasic nucleotide
  misc_feature 1..22: note = source = /note="Description of Artificial Sequence: Synthetic oligonucleotide"
  source 1..22: mol_type = other RNA
natggcttccagatatgccttt

SEQ ID NO: 1556 - RNA, 21 nt, synthetic construct
  misc_feature 1..21: note = source = /note="Description of Artificial Sequence: Synthetic oligonucleotide"
  source 1..21: mol_type = other RNA
aggcatatctggaagccattt

SEQ ID NO: 1557 - RNA, 21 nt, synthetic construct
  modified_base 21: mod_base = OTHER; note = Inverted abasic nucleotide
  misc_feature 1..21: note = source = /note="Description of Artificial Sequence: Synthetic oligonucleotide"
  source 1..21: mol_type = other RNA
acatggcttccagatatgccn

SEQ ID NO: 1558 - RNA, 23 nt, synthetic construct
  misc_feature 1..23: note = source = /note="Description of Artificial Sequence: Synthetic oligonucleotide"
  source 1..23: mol_type = other RNA
aggcatatctggaagccatgttt

SEQ ID NO: 1559 - RNA, 22 nt, synthetic construct
  modified_base 1: mod_base = OTHER; note = Inverted abasic nucleotide
  misc_feature 1..22: note = source = /note="Description of Artificial Sequence: Synthetic oligonucleotide"
  source 1..22: mol_type = other RNA
nacatggcttccagatatgcct

SEQ ID NO: 1560 - RNA, 23 nt, synthetic construct
  misc_feature 1..23: note = source = /note="Description of Artificial Sequence: Synthetic oligonucleotide"
  source 1..23: mol_type = other RNA
aggcatatctggaagccatgttt

SEQ ID NO: 1561 - RNA, 22 nt, synthetic construct
  modified_base 1: mod_base = OTHER; note = Inverted abasic nucleotide
  misc_feature 1..22: note = source = /note="Description of Artificial Sequence: Synthetic oligonucleotide"
  source 1..22: mol_type = other RNA
nacatggcttccagatatgcct

SEQ ID NO: 1562 - RNA, 23 nt, synthetic construct
  misc_feature 1..23: note = source = /note="Description of Artificial Sequence: Synthetic oligonucleotide"
  source 1..23: mol_type = other RNA
aggcatatctggaagccatgttt

SEQ ID NO: 1563 - RNA, 22 nt, synthetic construct
  modified_base 1: mod_base = OTHER; note = Inverted abasic nucleotide
  misc_feature 1..22: note = source = /note="Description of Artificial Sequence: Synthetic oligonucleotide"
  source 1..22: mol_type = other RNA
nacatggcttccagatatgcct

SEQ ID NO: 1564 - RNA, 23 nt, synthetic construct
  misc_feature 1..23: note = source = /note="Description of Artificial Sequence: Synthetic oligonucleotide"
  source 1..23: mol_type = other RNA
aggcatatctggaagccatgttt

SEQ ID NO: 1565 - RNA, 22 nt, synthetic construct
  modified_base 1: mod_base = OTHER; note = Inverted abasic nucleotide
  misc_feature 1..22: note = source = /note="Description of Artificial Sequence: Synthetic oligonucleotide"
  source 1..22: mol_type = other RNA
nacatggcttccagatatgcct

SEQ ID NO: 1566 - RNA, 23 nt, synthetic construct
  misc_feature 1..23: note = source = /note="Description of Artificial Sequence: Synthetic oligonucleotide"
  source 1..23: mol_type = other RNA
aggcatatctggaagccatgttt

SEQ ID NO: 1567 - RNA, 22 nt, synthetic construct
  modified_base 1: mod_base = OTHER; note = Inverted abasic nucleotide
  misc_feature 1..22: note = source = /note="Description of Artificial Sequence: Synthetic oligonucleotide"
  source 1..22: mol_type = other RNA
nacgtacccttcattgatgttt

SEQ ID NO: 1568 - RNA, 21 nt, synthetic construct
  misc_feature 1..21: note = source = /note="Description of Artificial Sequence: Synthetic oligonucleotide"
  source 1..21: mol_type = other RNA
acatcaatgaagggtacgttt

SEQ ID NO: 1569 - RNA, 22 nt, synthetic construct
  modified_base 1: mod_base = OTHER; note = Inverted abasic nucleotide
  misc_feature 1..22: note = source = /note="Description of Artificial Sequence: Synthetic oligonucleotide"
  source 1..22: mol_type = other RNA
ncaacgtacccttcattgatgt

SEQ ID NO: 1570 - RNA, 23 nt, synthetic construct
  misc_feature 1..23: note = source = /note="Description of Artificial Sequence: Synthetic oligonucleotide"
  source 1..23: mol_type = other RNA
acatcaatgaagggtacgttgtt

SEQ ID NO: 1571 - RNA, 22 nt, synthetic construct
  modified_base 1: mod_base = OTHER; note = Inverted abasic nucleotide
  misc_feature 1..22: note = source = /note="Description of Artificial Sequence: Synthetic oligonucleotide"
  source 1..22: mol_type = other RNA
ncaacgtacccttcattgatgt

SEQ ID NO: 1572 - RNA, 23 nt, synthetic construct
  misc_feature 1..23: note = source = /note="Description of Artificial Sequence: Synthetic oligonucleotide"
  source 1..23: mol_type = other RNA
acatcaatgaagggtacgttgtt

SEQ ID NO: 1573 - RNA, 22 nt, synthetic construct
  modified_base 1: mod_base = OTHER; note = Inverted abasic nucleotide
  misc_feature 1..22: note = source = /note="Description of Artificial Sequence: Synthetic oligonucleotide"
  source 1..22: mol_type = other RNA
nacgtacccttcattgatgttt

SEQ ID NO: 1574 - RNA, 21 nt, synthetic construct
  misc_feature 1..21: note = source = /note="Description of Artificial Sequence: Synthetic oligonucleotide"
  source 1..21: mol_type = other RNA
acatcaatgaagggtacgttt

SEQ ID NO: 1575 - RNA, 21 nt, synthetic construct
  modified_base 21: mod_base = OTHER; note = Inverted abasic nucleotide
  misc_feature 1..21: note = source = /note="Description of Artificial Sequence: Synthetic oligonucleotide"
  source 1..21: mol_type = other RNA
caacgtacccttcattgatgn

SEQ ID NO: 1576 - RNA, 23 nt, synthetic construct
  misc_feature 1..23: note = source = /note="Description of Artificial Sequence: Synthetic oligonucleotide"
  source 1..23: mol_type = other RNA
acatcaatgaagggtacgttgtt

SEQ ID NO: 1577 - RNA, 22 nt, synthetic construct
  modified_base 1: mod_base = OTHER; note = Inverted abasic nucleotide
  misc_feature 1..22: note = source = /note="Description of Artificial Sequence: Synthetic oligonucleotide"
  source 1..22: mol_type = other RNA
nacgtacccttcattgatgttt

SEQ ID NO: 1578 - RNA, 21 nt, synthetic construct
  misc_feature 1..21: note = source = /note="Description of Artificial Sequence: Synthetic oligonucleotide"
  source 1..21: mol_type = other RNA
acatcaatgaagggtacgttt

SEQ ID NO: 1579 - RNA, 21 nt, synthetic construct
  modified_base 21: mod_base = OTHER; note = Inverted abasic nucleotide
  misc_feature 1..21: note = source = /note="Description of Artificial Sequence: Synthetic oligonucleotide"
  source 1..21: mol_type = other RNA
caacgtacccttcattgatgn

SEQ ID NO: 1580 - RNA, 23 nt, synthetic construct
  misc_feature 1..23: note = source = /note="Description of Artificial Sequence: Synthetic oligonucleotide"
  source 1..23: mol_type = other RNA
acatcaatgaagggtacgttgtt

SEQ ID NO: 1581 - RNA, 22 nt, synthetic construct
  modified_base 1: mod_base = OTHER; note = Inverted abasic nucleotide
  misc_feature 1..22: note = source = /note="Description of Artificial Sequence: Synthetic oligonucleotide"
  source 1..22: mol_type = other RNA
ncaacgtacccttcattgatgt

SEQ ID NO: 1582 - RNA, 23 nt, synthetic construct
  misc_feature 1..23: note = source = /note="Description of Artificial Sequence: Synthetic oligonucleotide"
  source 1..23: mol_type = other RNA
acatcaatgaagggtacgttgtt

SEQ ID NO: 1583 - RNA, 22 nt, synthetic construct
  modified_base 1: mod_base = OTHER; note = Inverted abasic nucleotide
  misc_feature 1..22: note = source = /note="Description of Artificial Sequence: Synthetic oligonucleotide"
  source 1..22: mol_type = other RNA
nacgtacccttcattgatgttt

SEQ ID NO: 1584 - RNA, 21 nt, synthetic construct
  misc_feature 1..21: note = source = /note="Description of Artificial Sequence: Synthetic oligonucleotide"
  source 1..21: mol_type = other RNA
acatcaatgaagggtacgttt

SEQ ID NO: 1585 - RNA, 21 nt, synthetic construct
  modified_base 21: mod_base = OTHER; note = Inverted abasic nucleotide
  misc_feature 1..21: note = source = /note="Description of Artificial Sequence: Synthetic oligonucleotide"
  source 1..21: mol_type = other RNA
caacgtacccttcattgatgn

SEQ ID NO: 1586 - RNA, 23 nt, synthetic construct
  misc_feature 1..23: note = source = /note="Description of Artificial Sequence: Synthetic oligonucleotide"
  source 1..23: mol_type = other RNA
acatcaatgaagggtacgttgtt

SEQ ID NO: 1587 - RNA, 22 nt, synthetic construct
  modified_base 1: mod_base = OTHER; note = Inverted abasic nucleotide
  misc_feature 1..22: note = source = /note="Description of Artificial Sequence: Synthetic oligonucleotide"
  source 1..22: mol_type = other RNA
ncaacgtacccttcattgatgt

SEQ ID NO: 1588 - RNA, 23 nt, synthetic construct
  misc_feature 1..23: note = source = /note="Description of Artificial Sequence: Synthetic oligonucleotide"
  source 1..23: mol_type = other RNA
acatcaatgaagggtacgttgtt

SEQ ID NO: 1589 - RNA, 22 nt, synthetic construct
  modified_base 1: mod_base = OTHER; note = Inverted abasic nucleotide
  misc_feature 1..22: note = source = /note="Description of Artificial Sequence: Synthetic oligonucleotide"
  source 1..22: mol_type = other RNA
ncaacgtacccttcattgatgt

SEQ ID NO: 1590 - RNA, 23 nt, synthetic construct
  misc_feature 1..23: note = source = /note="Description of Artificial Sequence: Synthetic oligonucleotide"
  source 1..23: mol_type = other RNA
acatcaatgaagggtacgttgtt

SEQ ID NO: 1591 - RNA, 22 nt, synthetic construct
  modified_base 1: mod_base = OTHER; note = Inverted abasic nucleotide
  misc_feature 1..22: note = source = /note="Description of Artificial Sequence: Synthetic oligonucleotide"
  source 1..22: mol_type = other RNA
ncaacgtacccttcattgatgt

SEQ ID NO: 1592 - RNA, 23 nt, synthetic construct
  misc_feature 1..23: note = source = /note="Description of Artificial Sequence: Synthetic oligonucleotide"
  source 1..23: mol_type = other RNA
acatcaatgaagggtacgttgtt

SEQ ID NO: 1593 - RNA, 22 nt, synthetic construct
  modified_base 1: mod_base = OTHER; note = Inverted abasic nucleotide
  misc_feature 1..22: note = source = /note="Description of Artificial Sequence: Synthetic oligonucleotide"
  source 1..22: mol_type = other RNA
ncaacgtacccttcattgatgt

SEQ ID NO: 1594 - RNA, 23 nt, synthetic construct
  misc_feature 1..23: note = source = /note="Description of Artificial Sequence: Synthetic oligonucleotide"
  source 1..23: mol_type = other RNA
acatcaatgaagggtacgttgtt

SEQ ID NO: 1595 - RNA, 21 nt, synthetic construct
  misc_feature 1..21: note = source = /note="Description of Artificial Sequence: Synthetic oligonucleotide"
  source 1..21: mol_type = other RNA
ctgcttcatgcctttctacat

SEQ ID NO: 1596 - RNA, 23 nt, synthetic construct
  misc_feature 1..23: note = source = /note="Description of Artificial Sequence: Synthetic oligonucleotide"
  source 1..23: mol_type = other RNA
atgtagaaaggcatgaagcagtt

SEQ ID NO: 1597 - RNA, 21 nt, synthetic construct
  misc_feature 1..21: note = source = /note="Description of Artificial Sequence: Synthetic oligonucleotide"
  source 1..21: mol_type = other RNA
ctgcttcatgcctttctacat

SEQ ID NO: 1598 - RNA, 23 nt, synthetic construct
  misc_feature 1..23: note = source = /note="Description of Artificial Sequence: Synthetic oligonucleotide"
  source 1..23: mol_type = other RNA
atgtagaaaggcatgaagcagtt

SEQ ID NO: 1599 - RNA, 22 nt, synthetic construct
  modified_base 1: mod_base = OTHER; note = Inverted abasic nucleotide
  misc_feature 1..22: note = source = /note="Description of Artificial Sequence: Synthetic oligonucleotide"
  source 1..22: mol_type = other RNA
ngcttcatgcctttctacattt

SEQ ID NO: 1600 - RNA, 21 nt, synthetic construct
  misc_feature 1..21: note = source = /note="Description of Artificial Sequence: Synthetic oligonucleotide"
  source 1..21: mol_type = other RNA
atgtagaaaggcatgaagctt

SEQ ID NO: 1601 - RNA, 22 nt, synthetic construct
  modified_base 1: mod_base = OTHER; note = Inverted abasic nucleotide
  misc_feature 1..22: note = source = /note="Description of Artificial Sequence: Synthetic oligonucleotide"
  source 1..22: mol_type = other RNA
ngcttcatgcctttctacattt

SEQ ID NO: 1602 - RNA, 21 nt, synthetic construct
  misc_feature 1..21: note = source = /note="Description of Artificial Sequence: Synthetic oligonucleotide"
  source 1..21: mol_type = other RNA
atgtagaaaggcatgaagctt

SEQ ID NO: 1603 - RNA, 21 nt, synthetic construct
  misc_feature 1..21: note = source = /note="Description of Artificial Sequence: Synthetic oligonucleotide"
  source 1..21: mol_type = other RNA
ctgcttcatgcctttctacat

SEQ ID NO: 1604 - RNA, 23 nt, synthetic construct
  misc_feature 1..23: note = source = /note="Description of Artificial Sequence: Synthetic oligonucleotide"
  source 1..23: mol_type = other RNA
atgtagaaaggcatgaagcagtt

SEQ ID NO: 1605 - RNA, 21 nt, synthetic construct
  misc_feature 1..21: note = source = /note="Description of Artificial Sequence: Synthetic oligonucleotide"
  source 1..21: mol_type = other RNA
ctgcttcatgcctttctacat

SEQ ID NO: 1606 - RNA, 23 nt, synthetic construct
  misc_feature 1..23: note = source = /note="Description of Artificial Sequence: Synthetic oligonucleotide"
  source 1..23: mol_type = other RNA
atgtagaaaggcatgaagcagtt

SEQ ID NO: 1607 - RNA, 22 nt, synthetic construct
  modified_base 1: mod_base = OTHER; note = Inverted abasic nucleotide
  misc_feature 1..22: note = source = /note="Description of Artificial Sequence: Synthetic oligonucleotide"
  source 1..22: mol_type = other RNA
nctgcttcatgcctttctacat

SEQ ID NO: 1608 - RNA, 23 nt, synthetic construct
  misc_feature 1..23: note = source = /note="Description of Artificial Sequence: Synthetic oligonucleotide"
  source 1..23: mol_type = other RNA
atgtagaaaggcatgaagcagtt

SEQ ID NO: 1609 - RNA, 21 nt, synthetic construct
  modified_base 21: mod_base = OTHER; note = Inverted abasic nucleotide
  misc_feature 1..21: note = source = /note="Description of Artificial Sequence: Synthetic oligonucleotide"
  source 1..21: mol_type = other RNA
ctgcttcatgcctttctacan

SEQ ID NO: 1610 - RNA, 23 nt, synthetic construct
  misc_feature 1..23: note = source = /note="Description of Artificial Sequence: Synthetic oligonucleotide"
  source 1..23: mol_type = other RNA
atgtagaaaggcatgaagcagtt

SEQ ID NO: 1611 - RNA, 22 nt, synthetic construct
  modified_base 1: mod_base = OTHER; note = Inverted abasic nucleotide
  misc_feature 1..22: note = source = /note="Description of Artificial Sequence: Synthetic oligonucleotide"
  source 1..22: mol_type = other RNA
nctgcttcatgcctttctacat

SEQ ID NO: 1612 - RNA, 23 nt, synthetic construct
  misc_feature 1..23: note = source = /note="Description of Artificial Sequence: Synthetic oligonucleotide"
  source 1..23: mol_type = other RNA
atgtagaaaggcatgaagcagtt

SEQ ID NO: 1613 - DNA, 22 bp, synthetic construct
  modified_base 1: mod_base = OTHER; note = Inverted abasic nucleotide
  misc_feature 1..22: note = source = /note="Description of Artificial Sequence: Synthetic oligonucleotide"
  misc_feature 1..22: note = source = /note="Description of Combined DNA/RNA Molecule: Synthetic oligonucleotide"
  source 1..22: mol_type = other DNA
nctgcttcatgcctttctacat

SEQ ID NO: 1614 - RNA, 23 nt, synthetic construct
  misc_feature 1..23: note = source = /note="Description of Artificial Sequence: Synthetic oligonucleotide"
  source 1..23: mol_type = other RNA
atgtagaaaggcatgaagcagtt

SEQ ID NO: 1615 - RNA, 21 nt, synthetic construct
  misc_feature 1..21: note = source = /note="Description of Artificial Sequence: Synthetic oligonucleotide"
  source 1..21: mol_type = other RNA
ctgcttcatgcctttctacat

SEQ ID NO: 1616 - RNA, 23 nt, synthetic construct
  misc_feature 1..23: note = source = /note="Description of Artificial Sequence: Synthetic oligonucleotide"
  source 1..23: mol_type = other RNA
atgtagaaaggcatgaagcagtt

SEQ ID NO: 1617 - RNA, 22 nt, synthetic construct
  modified_base 1: mod_base = OTHER; note = Inverted abasic nucleotide
  misc_feature 1..22: note = source = /note="Description of Artificial Sequence: Synthetic oligonucleotide"
  source 1..22: mol_type = other RNA
nctgcttcatgcctttctacat

SEQ ID NO: 1618 - RNA, 23 nt, synthetic construct
  misc_feature 1..23: note = source = /note="Description of Artificial Sequence: Synthetic oligonucleotide"
  source 1..23: mol_type = other RNA
atgtagaaaggcatgaagcagtt

SEQ ID NO: 1619 - RNA, 21 nt, synthetic construct
  misc_feature 1..21: note = source = /note="Description of Artificial Sequence: Synthetic oligonucleotide"
  source 1..21: mol_type = other RNA
ctgcttcatgcctttctacat

SEQ ID NO: 1620 - RNA, 23 nt, synthetic construct
  misc_feature 1..23: note = source = /note="Description of Artificial Sequence: Synthetic oligonucleotide"
  source 1..23: mol_type = other RNA
atgtagaaaggcatgaagcagtt

SEQ ID NO: 1621 - RNA, 21 nt, synthetic construct
  modified_base 21: mod_base = OTHER; note = Inverted abasic nucleotide
  misc_feature 1..21: note = source = /note="Description of Artificial Sequence: Synthetic oligonucleotide"
  source 1..21: mol_type = other RNA
ctgcttcatgcctttctacan

SEQ ID NO: 1622 - RNA, 23 nt, synthetic construct
  misc_feature 1..23: note = source = /note="Description of Artificial Sequence: Synthetic oligonucleotide"
  source 1..23: mol_type = other RNA
atgtagaaaggcatgaagcagtt

SEQ ID NO: 1623 - RNA, 22 nt, synthetic construct
  modified_base 1: mod_base = OTHER; note = Inverted abasic nucleotide
  misc_feature 1..22: note = source = /note="Description of Artificial Sequence: Synthetic oligonucleotide"
  source 1..22: mol_type = other RNA
nctgcttcatgcctttctacat

SEQ ID NO: 1624 - RNA, 23 nt, synthetic construct
  misc_feature 1..23: note = source = /note="Description of Artificial Sequence: Synthetic oligonucleotide"
  source 1..23: mol_type = other RNA
atgtagaaaggcatgaagcagtt

SEQ ID NO: 1625 - RNA, 21 nt, synthetic construct
  misc_feature 1..21: note = source = /note="Description of Artificial Sequence: Synthetic oligonucleotide"
  source 1..21: mol_type = other RNA
ctgcttcatgcctttctacat

SEQ ID NO: 1626 - RNA, 23 nt, synthetic construct
  misc_feature 1..23: note = source = /note="Description of Artificial Sequence: Synthetic oligonucleotide"
  source 1..23: mol_type = other RNA
atgtagaaaggcatgaagcagtt

SEQ ID NO: 1627 - RNA, 21 nt, synthetic construct
  modified_base 21: mod_base = OTHER; note = Inverted abasic nucleotide
  misc_feature 1..21: note = source = /note="Description of Artificial Sequence: Synthetic oligonucleotide"
  source 1..21: mol_type = other RNA
ctgcttcatgcctttctacan

SEQ ID NO: 1628 - RNA, 23 nt, synthetic construct
  misc_feature 1..23: note = source = /note="Description of Artificial Sequence: Synthetic oligonucleotide"
  source 1..23: mol_type = other RNA
atgtagaaaggcatgaagcagtt

SEQ ID NO: 1629 - RNA, 22 nt, synthetic construct
  modified_base 1: mod_base = OTHER; note = Inverted abasic nucleotide
  misc_feature 1..22: note = source = /note="Description of Artificial Sequence: Synthetic oligonucleotide"
  source 1..22: mol_type = other RNA
nctgcttcatgcctttctacat

SEQ ID NO: 1630 - RNA, 23 nt, synthetic construct
  misc_feature 1..23: note = source = /note="Description of Artificial Sequence: Synthetic oligonucleotide"
  source 1..23: mol_type = other RNA
atgtagaaaggcatgaagcagtt

SEQ ID NO: 1631 - RNA, 21 nt, synthetic construct
  modified_base 21: mod_base = OTHER; note = Inverted abasic nucleotide
  misc_feature 1..21: note = source = /note="Description of Artificial Sequence: Synthetic oligonucleotide"
  source 1..21: mol_type = other RNA
ctgcttcatgcctttctacan

SEQ ID NO: 1632 - RNA, 23 nt, synthetic construct
  misc_feature 1..23: note = source = /note="Description of Artificial Sequence: Synthetic oligonucleotide"
  source 1..23: mol_type = other RNA
atgtagaaaggcatgaagcagtt

SEQ ID NO: 1633 - RNA, 22 nt, synthetic construct
  modified_base 1: mod_base = OTHER; note = Inverted abasic nucleotide
  misc_feature 1..22: note = source = /note="Description of Artificial Sequence: Synthetic oligonucleotide"
  source 1..22: mol_type = other RNA
nctgcttcatgcctttctacat

SEQ ID NO: 1634 - RNA, 23 nt, synthetic construct
  misc_feature 1..23: note = source = /note="Description of Artificial Sequence: Synthetic oligonucleotide"
  source 1..23: mol_type = other RNA
atgtagaaaggcatgaagcagtt

SEQ ID NO: 1635 - RNA, 22 nt, synthetic construct
  modified_base 1: mod_base = OTHER; note = Inverted abasic nucleotide
  misc_feature 1..22: note = source = /note="Description of Artificial Sequence: Synthetic oligonucleotide"
  source 1..22: mol_type = other RNA
ngcttcatgcctttctacattt

SEQ ID NO: 1636 - RNA, 21 nt, synthetic construct
  misc_feature 1..21: note = source = /note="Description of Artificial Sequence: Synthetic oligonucleotide"
  source 1..21: mol_type = other RNA
atgtagaaaggcatgaagctt

SEQ ID NO: 1637 - RNA, 22 nt, synthetic construct
  modified_base 1: mod_base = OTHER; note = Inverted abasic nucleotide
  misc_feature 1..22: note = source = /note="Description of Artificial Sequence: Synthetic oligonucleotide"
  source 1..22: mol_type = other RNA
ngcttcatgcctttctacattt

SEQ ID NO: 1638 - RNA, 21 nt, synthetic construct
  misc_feature 1..21: note = source = /note="Description of Artificial Sequence: Synthetic oligonucleotide"
  source 1..21: mol_type = other RNA
atgtagaaaggcatgaagctt

SEQ ID NO: 1639 - RNA, 22 nt, synthetic construct
  modified_base 1: mod_base = OTHER; note = Inverted abasic nucleotide
  misc_feature 1..22: note = source = /note="Description of Artificial Sequence: Synthetic oligonucleotide"
  source 1..22: mol_type = other RNA
ngcttcatgcctttctacattt

SEQ ID NO: 1640 - RNA, 21 nt, synthetic construct
  misc_feature 1..21: note = source = /note="Description of Artificial Sequence: Synthetic oligonucleotide"
  source 1..21: mol_type = other RNA
atgtagaaaggcatgaagctt

SEQ ID NO: 1641 - RNA, 22 nt, synthetic construct
  modified_base 1: mod_base = OTHER; note = Inverted abasic nucleotide
  misc_feature 1..22: note = source = /note="Description of Artificial Sequence: Synthetic oligonucleotide"
  source 1..22: mol_type = other RNA
ngcttcatgcctttctacattt

SEQ ID NO: 1642 - RNA, 21 nt, synthetic construct
  misc_feature 1..21: note = source = /note="Description of Artificial Sequence: Synthetic oligonucleotide"
  source 1..21: mol_type = other RNA
atgtagaaaggcatgaagctt

SEQ ID NO: 1643 - RNA, 22 nt, synthetic construct
  modified_base 1: mod_base = OTHER; note = Inverted abasic nucleotide
  misc_feature 1..22: note = source = /note="Description of Artificial Sequence: Synthetic oligonucleotide"
  source 1..22: mol_type = other RNA
ngcttcatgcctttctacattt

SEQ ID NO: 1644 - RNA, 21 nt, synthetic construct
  misc_feature 1..21: note = source = /note="Description of Artificial Sequence: Synthetic oligonucleotide"
  source 1..21: mol_type = other RNA
atgtagaaaggcatgaagctt

SEQ ID NO: 1645 - RNA, 21 nt, synthetic construct
  misc_feature 1..21: note = source = /note="Description of Artificial Sequence: Synthetic oligonucleotide"
  source 1..21: mol_type = other RNA
ctgcttcatgcccttctacat

SEQ ID NO: 1646 - RNA, 23 nt, synthetic construct
  misc_feature 1..23: note = source = /note="Description of Artificial Sequence: Synthetic oligonucleotide"
  source 1..23: mol_type = other RNA
atgtagaagggcatgaagcagtt

SEQ ID NO: 1647 - RNA, 22 nt, synthetic construct
  modified_base 1: mod_base = OTHER; note = Inverted abasic nucleotide
  misc_feature 1..22: note = source = /note="Description of Artificial Sequence: Synthetic oligonucleotide"
  source 1..22: mol_type = other RNA
ngcttcatgcccttctacattt

SEQ ID NO: 1648 - RNA, 21 nt, synthetic construct
  misc_feature 1..21: note = source = /note="Description of Artificial Sequence: Synthetic oligonucleotide"
  source 1..21: mol_type = other RNA
atgtagaagggcatgaagctt

SEQ ID NO: 1649 - RNA, 22 nt, synthetic construct
  modified_base 1: mod_base = OTHER; note = Inverted abasic nucleotide
  misc_feature 1..22: note = source = /note="Description of Artificial Sequence: Synthetic oligonucleotide"
  source 1..22: mol_type = other RNA
ngcttcatgcccttctacattt

SEQ ID NO: 1650 - RNA, 21 nt, synthetic construct
  misc_feature 1..21: note = source = /note="Description of Artificial Sequence: Synthetic oligonucleotide"
  source 1..21: mol_type = other RNA
atgtagaagggcatgaagctt

SEQ ID NO: 1651 - RNA, 22 nt, synthetic construct
  modified_base 1: mod_base = OTHER; note = Inverted abasic nucleotide
  misc_feature 1..22: note = source = /note="Description of Artificial Sequence: Synthetic oligonucleotide"
  source 1..22: mol_type = other RNA
ngcttcatgcccttctacattt

SEQ ID NO: 1652 - RNA, 21 nt, synthetic construct
  misc_feature 1..21: note = source = /note="Description of Artificial Sequence: Synthetic oligonucleotide"
  source 1..21: mol_type = other RNA
atgtagaagggcatgaagctt

SEQ ID NO: 1653 - RNA, 21 nt, synthetic construct
  modified_base 21: mod_base = OTHER; note = Inverted abasic nucleotide
  misc_feature 1..21: note = source = /note="Description of Artificial Sequence: Synthetic oligonucleotide"
  source 1..21: mol_type = other RNA
ctgcttcatgcccttctacan

SEQ ID NO: 1654 - RNA, 23 nt, synthetic construct
  misc_feature 1..23: note = source = /note="Description of Artificial Sequence: Synthetic oligonucleotide"
  source 1..23: mol_type = other RNA
atgtagaagggcatgaagcagtt

SEQ ID NO: 1655 - RNA, 22 nt, synthetic construct
  modified_base 1: mod_base = OTHER; note = Inverted abasic nucleotide
  misc_feature 1..22: note = source = /note="Description of Artificial Sequence: Synthetic oligonucleotide"
  source 1..22: mol_type = other RNA
nctgcttcatgcccttctacat

SEQ ID NO: 1656 - RNA, 23 nt, synthetic construct
  misc_feature 1..23: note = source = /note="Description of Artificial Sequence: Synthetic oligonucleotide"
  source 1..23: mol_type = other RNA
atgtagaagggcatgaagcagtt

SEQ ID NO: 1657 - RNA, 22 nt, synthetic construct
  modified_base 1: mod_base = OTHER; note = Inverted abasic nucleotide
  misc_feature 1..22: note = source = /note="Description of Artificial Sequence: Synthetic oligonucleotide"
  source 1..22: mol_type = other RNA
ngcttcatgcccttctacattt

SEQ ID NO: 1658 - RNA, 21 nt, synthetic construct
  misc_feature 1..21: note = source = /note="Description of Artificial Sequence: Synthetic oligonucleotide"
  source 1..21: mol_type = other RNA
atgtagaagggcatgaagctt

SEQ ID NO: 1659 - RNA, 21 nt, synthetic construct
  misc_feature 1..21: note = source = /note="Description of Artificial Sequence: Synthetic oligonucleotide"
  source 1..21: mol_type = other RNA
atgttcctgcttcatgccttt

SEQ ID NO: 1660 - RNA, 21 nt, synthetic construct
  misc_feature 1..21: note = source = /note="Description of Artificial Sequence: Synthetic oligonucleotide"
  source 1..21: mol_type = other RNA
aggcatgaagcaggaacattt

SEQ ID NO: 1661 - RNA, 21 nt, synthetic construct
  misc_feature 1..21: note = source = /note="Description of Artificial Sequence: Synthetic oligonucleotide"
  source 1..21: mol_type = other RNA
tgttcctgcttcatgcctttt

SEQ ID NO: 1662 - RNA, 21 nt, synthetic construct
  misc_feature 1..21: note = source = /note="Description of Artificial Sequence: Synthetic oligonucleotide"
  source 1..21: mol_type = other RNA
aaggcatgaagcaggaacatt

SEQ ID NO: 1663 - RNA, 21 nt, synthetic construct
  misc_feature 1..21: note = source = /note="Description of Artificial Sequence: Synthetic oligonucleotide"
  source 1..21: mol_type = other RNA
tgcctttctacagtggccttt

SEQ ID NO: 1664 - RNA, 21 nt, synthetic construct
  misc_feature 1..21: note = source = /note="Description of Artificial Sequence: Synthetic oligonucleotide"
  source 1..21: mol_type = other RNA
aggccactgtagaaaggcatt

SEQ ID NO: 1665 - RNA, 21 nt, synthetic construct
  misc_feature 1..21: note = source = /note="Description of Artificial Sequence: Synthetic oligonucleotide"
  source 1..21: mol_type = other RNA
cgtacttcgtccttgtatgtt

SEQ ID NO: 1666 - RNA, 21 nt, synthetic construct
  misc_feature 1..21: note = source = /note="Description of Artificial Sequence: Synthetic oligonucleotide"
  source 1..21: mol_type = other RNA
catacaaggacgaagtacgtt

SEQ ID NO: 1667 - DNA, 22 bp, synthetic construct
  modified_base 1: mod_base = OTHER; note = Inverted abasic nucleotide
  misc_feature 1..22: note = source = /note="Description of Artificial Sequence: Synthetic oligonucleotide"
  misc_feature 1..22: note = source = /note="Description of Combined DNA/RNA Molecule: Synthetic oligonucleotide"
  source 1..22: mol_type = other DNA
ngcttcatgcccttctacattt

SEQ ID NO: 1668 - RNA, 21 nt, synthetic construct
  misc_feature 1..21: note = source = /note="Description of Artificial Sequence: Synthetic oligonucleotide"
  source 1..21: mol_type = other RNA
atgtagaagggcatgaagctt

SEQ ID NO: 1669 - RNA, 22 nt, synthetic construct
  modified_base 1: mod_base = OTHER; note = Inverted abasic nucleotide
  misc_feature 1..22: note = source = /note="Description of Artificial Sequence: Synthetic oligonucleotide"
  source 1..22: mol_type = other RNA
ngcttcatgcccttctacattt

SEQ ID NO: 1670 - RNA, 21 nt, synthetic construct
  misc_feature 1..21: note = source = /note="Description of Artificial Sequence: Synthetic oligonucleotide"
  source 1..21: mol_type = other RNA
atgtagaagggcatgaagctt

SEQ ID NO: 1671 - RNA, 22 nt, synthetic construct
  modified_base 1: mod_base = OTHER; note = Inverted abasic nucleotide
  misc_feature 1..22: note = source = /note="Description of Artificial Sequence: Synthetic oligonucleotide"
  source 1..22: mol_type = other RNA
ngcttcatgcccttctacattt

SEQ ID NO: 1672 - RNA, 21 nt, synthetic construct
  misc_feature 1..21: note = source = /note="Description of Artificial Sequence: Synthetic oligonucleotide"
  source 1..21: mol_type = other RNA
atgtagaagggcatgaagctt

SEQ ID NO: 1673 - RNA, 22 nt, synthetic construct
  modified_base 1: mod_base = OTHER; note = Inverted abasic nucleotide
  misc_feature 1..22: note = source = /note="Description of Artificial Sequence: Synthetic oligonucleotide"
  source 1..22: mol_type = other RNA
ngcttcatgcccttctacattt

SEQ ID NO: 1674 - RNA, 21 nt, synthetic construct
  misc_feature 1..21: note = source = /note="Description of Artificial Sequence: Synthetic oligonucleotide"
  source 1..21: mol_type = other RNA
atgtagaagggcatgaagctt

SEQ ID NO: 1675 - RNA, 22 nt, synthetic construct
  modified_base 1: mod_base = OTHER; note = Inverted abasic nucleotide
  misc_feature 1..22: note = source = /note="Description of Artificial Sequence: Synthetic oligonucleotide"
  source 1..22: mol_type = other RNA
ngcttcatgcccttctacattt

SEQ ID NO: 1676 - RNA, 21 nt, synthetic construct
  misc_feature 1..21: note = source = /note="Description of Artificial Sequence: Synthetic oligonucleotide"
  source 1..21: mol_type = other RNA
atgtagaagggcatgaagctt

SEQ ID NO: 1677 - RNA, 22 nt, synthetic construct
  modified_base 1: mod_base = OTHER; note = Inverted abasic nucleotide
  misc_feature 1..22: note = source = /note="Description of Artificial Sequence: Synthetic oligonucleotide"
  source 1..22: mol_type = other RNA
ngcttcatgcccttctacattt

SEQ ID NO: 1678 - RNA, 21 nt, synthetic construct
  misc_feature 1..21: note = source = /note="Description of Artificial Sequence: Synthetic oligonucleotide"
  source 1..21: mol_type = other RNA
atgtagaagggcatgaagctt

SEQ ID NO: 1679 - RNA, 22 nt, synthetic construct
  modified_base 1: mod_base = OTHER; note = Inverted abasic nucleotide
  misc_feature 1..22: note = source = /note="Description of Artificial Sequence: Synthetic oligonucleotide"
  source 1..22: mol_type = other RNA
ncctgcttcatgcctttctatt

SEQ ID NO: 1680 - RNA, 21 nt, synthetic construct
  misc_feature 1..21: note = source = /note="Description of Artificial Sequence: Synthetic oligonucleotide"
  source 1..21: mol_type = other RNA
tagaaaggcatgaagcaggtt

SEQ ID NO: 1681 - RNA, 22 nt, synthetic construct
  modified_base 1: mod_base = OTHER; note = Inverted abasic nucleotide
  misc_feature 1..22: note = source = /note="Description of Artificial Sequence: Synthetic oligonucleotide"
  source 1..22: mol_type = other RNA
ncctgcttcatgcctttctatt

SEQ ID NO: 1682 - RNA, 21 nt, synthetic construct
  misc_feature 1..21: note = source = /note="Description of Artificial Sequence: Synthetic oligonucleotide"
  source 1..21: mol_type = other RNA
tagaaaggcatgaagcaggtt

SEQ ID NO: 1683 - RNA, 21 nt, synthetic construct
  modified_base 21: mod_base = OTHER; note = Inverted abasic nucleotide
  misc_feature 1..21: note = source = /note="Description of Artificial Sequence: Synthetic oligonucleotide"
  source 1..21: mol_type = other RNA
ttcctgcttcatgcctttctn

SEQ ID NO: 1684 - RNA, 23 nt, synthetic construct
  misc_feature 1..23: note = source = /note="Description of Artificial Sequence: Synthetic oligonucleotide"
  source 1..23: mol_type = other RNA
tagaaaggcatgaagcaggaatt

SEQ ID NO: 1685 - RNA, 22 nt, synthetic construct
  modified_base 1: mod_base = OTHER; note = Inverted abasic nucleotide
  misc_feature 1..22: note = source = /note="Description of Artificial Sequence: Synthetic oligonucleotide"
  source 1..22: mol_type = other RNA
ncctgcttcatgcctttctatt

SEQ ID NO: 1686 - RNA, 21 nt, synthetic construct
  misc_feature 1..21: note = source = /note="Description of Artificial Sequence: Synthetic oligonucleotide"
  source 1..21: mol_type = other RNA
tagaaaggcatgaagcaggtt

SEQ ID NO: 1687 - RNA, 21 nt, synthetic construct
  modified_base 21: mod_base = OTHER; note = Inverted abasic nucleotide
  misc_feature 1..21: note = source = /note="Description of Artificial Sequence: Synthetic oligonucleotide"
  source 1..21: mol_type = other RNA
ttcctgcttcatgcctttctn

SEQ ID NO: 1688 - RNA, 23 nt, synthetic construct
  misc_feature 1..23: note = source = /note="Description of Artificial Sequence: Synthetic oligonucleotide"
  source 1..23: mol_type = other RNA
tagaaaggcatgaagcaggaatt

SEQ ID NO: 1689 - RNA, 22 nt, synthetic construct
  modified_base 1: mod_base = OTHER; note = Inverted abasic nucleotide
  misc_feature 1..22: note = source = /note="Description of Artificial Sequence: Synthetic oligonucleotide"
  source 1..22: mol_type = other RNA
natgcctttctacagtggcttt

SEQ ID NO: 1690 - RNA, 21 nt, synthetic construct
  misc_feature 1..21: note = source = /note="Description of Artificial Sequence: Synthetic oligonucleotide"
  source 1..21: mol_type = other RNA
agccactgtagaaaggcattt

SEQ ID NO: 1691 - RNA, 22 nt, synthetic construct
  modified_base 1: mod_base = OTHER; note = Inverted abasic nucleotide
  misc_feature 1..22: note = source = /note="Description of Artificial Sequence: Synthetic oligonucleotide"
  source 1..22: mol_type = other RNA
natgcctttctacagtggcttt

SEQ ID NO: 1692 - RNA, 21 nt, synthetic construct
  misc_feature 1..21: note = source = /note="Description of Artificial Sequence: Synthetic oligonucleotide"
  source 1..21: mol_type = other RNA
agccactgtagaaaggcattt

SEQ ID NO: 1693 - RNA, 22 nt, synthetic construct
  modified_base 1: mod_base = OTHER; note = Inverted abasic nucleotide
  misc_feature 1..22: note = source = /note="Description of Artificial Sequence: Synthetic oligonucleotide"
  source 1..22: mol_type = other RNA
natgcctttctacagtggcttt

SEQ ID NO: 1694 - RNA, 21 nt, synthetic construct
  misc_feature 1..21: note = source = /note="Description of Artificial Sequence: Synthetic oligonucleotide"
  source 1..21: mol_type = other RNA
agccactgtagaaaggcattt

SEQ ID NO: 1695 - RNA, 21 nt, synthetic construct
  modified_base 21: mod_base = OTHER; note = Inverted abasic nucleotide
  misc_feature 1..21: note = source = /note="Description of Artificial Sequence: Synthetic oligonucleotide"
  source 1..21: mol_type = other RNA
tcatgcctttctacagtggcn

SEQ ID NO: 1696 - RNA, 23 nt, synthetic construct
  misc_feature 1..23: note = source = /note="Description of Artificial Sequence: Synthetic oligonucleotide"
  source 1..23: mol_type = other RNA
agccactgtagaaaggcatgatt

SEQ ID NO: 1697 - RNA, 22 nt, synthetic construct
  modified_base 1: mod_base = OTHER; note = Inverted abasic nucleotide
  misc_feature 1..22: note = source = /note="Description of Artificial Sequence: Synthetic oligonucleotide"
  source 1..22: mol_type = other RNA
natgcctttctacagtggcttt

SEQ ID NO: 1698 - RNA, 21 nt, synthetic construct
  misc_feature 1..21: note = source = /note="Description of Artificial Sequence: Synthetic oligonucleotide"
  source 1..21: mol_type = other RNA
agccactgtagaaaggcattt

SEQ ID NO: 1699 - RNA, 22 nt, synthetic construct
  modified_base 1: mod_base = OTHER; note = Inverted abasic nucleotide
  misc_feature 1..22: note = source = /note="Description of Artificial Sequence: Synthetic oligonucleotide"
  source 1..22: mol_type = other RNA
ntcatgcctttctacagtggct

SEQ ID NO: 1700 - RNA, 23 nt, synthetic construct
  misc_feature 1..23: note = source = /note="Description of Artificial Sequence: Synthetic oligonucleotide"
  source 1..23: mol_type = other RNA
agccactgtagaaaggcatgatt

SEQ ID NO: 1701 - RNA, 22 nt, synthetic construct
  modified_base 1: mod_base = OTHER; note = Inverted abasic nucleotide
  misc_feature 1..22: note = source = /note="Description of Artificial Sequence: Synthetic oligonucleotide"
  source 1..22: mol_type = other RNA
ntgcttcatgcctttctacagt

SEQ ID NO: 1702 - RNA, 23 nt, synthetic construct
  misc_feature 1..23: note = source = /note="Description of Artificial Sequence: Synthetic oligonucleotide"
  source 1..23: mol_type = other RNA
actgtagaaaggcatgaagcatt

SEQ ID NO: 1703 - RNA, 22 nt, synthetic construct
  modified_base 1: mod_base = OTHER; note = Inverted abasic nucleotide
  misc_feature 1..22: note = source = /note="Description of Artificial Sequence: Synthetic oligonucleotide"
  source 1..22: mol_type = other RNA
ncttcatgcctttctacagttt

SEQ ID NO: 1704 - RNA, 21 nt, synthetic construct
  misc_feature 1..21: note = source = /note="Description of Artificial Sequence: Synthetic oligonucleotide"
  source 1..21: mol_type = other RNA
actgtagaaaggcatgaagtt

SEQ ID NO: 1705 - RNA, 21 nt, synthetic construct
  modified_base 21: mod_base = OTHER; note = Inverted abasic nucleotide
  misc_feature 1..21: note = source = /note="Description of Artificial Sequence: Synthetic oligonucleotide"
  source 1..21: mol_type = other RNA
tgcttcatgcctttctacagn

SEQ ID NO: 1706 - RNA, 23 nt, synthetic construct
  misc_feature 1..23: note = source = /note="Description of Artificial Sequence: Synthetic oligonucleotide"
  source 1..23: mol_type = other RNA
actgtagaaaggcatgaagcatt

SEQ ID NO: 1707 - RNA, 22 nt, synthetic construct
  modified_base 1: mod_base = OTHER; note = Inverted abasic nucleotide
  misc_feature 1..22: note = source = /note="Description of Artificial Sequence: Synthetic oligonucleotide"
  source 1..22: mol_type = other RNA
ncttcatgcctttctacagttt

SEQ ID NO: 1708 - RNA, 21 nt, synthetic construct
  misc_feature 1..21: note = source = /note="Description of Artificial Sequence: Synthetic oligonucleotide"
  source 1..21: mol_type = other RNA
actgtagaaaggcatgaagtt

SEQ ID NO: 1709 - RNA, 21 nt, synthetic construct
  modified_base 21: mod_base = OTHER; note = Inverted abasic nucleotide
  misc_feature 1..21: note = source = /note="Description of Artificial Sequence: Synthetic oligonucleotide"
  source 1..21: mol_type = other RNA
tgcttcatgcctttctacagn

SEQ ID NO: 1710 - RNA, 23 nt, synthetic construct
  misc_feature 1..23: note = source = /note="Description of Artificial Sequence: Synthetic oligonucleotide"
  source 1..23: mol_type = other RNA
actgtagaaaggcatgaagcatt

SEQ ID NO: 1711 - RNA, 22 nt, synthetic construct
  modified_base 1: mod_base = OTHER; note = Inverted abasic nucleotide
  misc_feature 1..22: note = source = /note="Description of Artificial Sequence: Synthetic oligonucleotide"
  source 1..22: mol_type = other RNA
ntgcttcatgcctttctacagt

SEQ ID NO: 1712 - RNA, 23 nt, synthetic construct
  misc_feature 1..23: note = source = /note="Description of Artificial Sequence: Synthetic oligonucleotide"
  source 1..23: mol_type = other RNA
actgtagaaaggcatgaagcatt

SEQ ID NO: 1713 - RNA, 22 nt, synthetic construct
  modified_base 1: mod_base = OTHER; note = Inverted abasic nucleotide
  misc_feature 1..22: note = source = /note="Description of Artificial Sequence: Synthetic oligonucleotide"
  source 1..22: mol_type = other RNA
ntgcttcatgcctttctacagt

SEQ ID NO: 1714 - RNA, 23 nt, synthetic construct
  misc_feature 1..23: note = source = /note="Description of Artificial Sequence: Synthetic oligonucleotide"
  source 1..23: mol_type = other RNA
actgtagaaaggcatgaagcatt

SEQ ID NO: 1715 - RNA, 22 nt, synthetic construct
  modified_base 1: mod_base = OTHER; note = Inverted abasic nucleotide
  misc_feature 1..22: note = source = /note="Description of Artificial Sequence: Synthetic oligonucleotide"
  source 1..22: mol_type = other RNA
ntgcttcatgcctttctacagt

SEQ ID NO: 1716 - RNA, 23 nt, synthetic construct
  misc_feature 1..23: note = source = /note="Description of Artificial Sequence: Synthetic oligonucleotide"
  source 1..23: mol_type = other RNA
actgtagaaaggcatgaagcatt

SEQ ID NO: 1717 - RNA, 22 nt, synthetic construct
  modified_base 1: mod_base = OTHER; note = Inverted abasic nucleotide
  misc_feature 1..22: note = source = /note="Description of Artificial Sequence: Synthetic oligonucleotide"
  source 1..22: mol_type = other RNA
ntgcttcatgcctttctacagt

SEQ ID NO: 1718 - RNA, 23 nt, synthetic construct
  misc_feature 1..23: note = source = /note="Description of Artificial Sequence: Synthetic oligonucleotide"
  source 1..23: mol_type = other RNA
actgtagaaaggcatgaagcatt

SEQ ID NO: 1719 - RNA, 22 nt, synthetic construct
  modified_base 1: mod_base = OTHER; note = Inverted abasic nucleotide
  misc_feature 1..22: note = source = /note="Description of Artificial Sequence: Synthetic oligonucleotide"
  source 1..22: mol_type = other RNA
ngttcctgcttcatgccttttt

SEQ ID NO: 1720 - RNA, 21 nt, synthetic construct
  misc_feature 1..21: note = source = /note="Description of Artificial Sequence: Synthetic oligonucleotide"
  source 1..21: mol_type = other RNA
aaaggcatgaagcaggaactt

SEQ ID NO: 1721 - RNA, 22 nt, synthetic construct
  modified_base 1: mod_base = OTHER; note = Inverted abasic nucleotide
  misc_feature 1..22: note = source = /note="Description of Artificial Sequence: Synthetic oligonucleotide"
  source 1..22: mol_type = other RNA
ncctgcttcatgcctttctatt

SEQ ID NO: 1722 - RNA, 21 nt, synthetic construct
  misc_feature 1..21: note = source = /note="Description of Artificial Sequence: Synthetic oligonucleotide"
  source 1..21: mol_type = other RNA
tagaaaggcatgaagcaggtt

SEQ ID NO: 1723 - RNA, 22 nt, synthetic construct
  modified_base 1: mod_base = OTHER; note = Inverted abasic nucleotide
  misc_feature 1..22: note = source = /note="Description of Artificial Sequence: Synthetic oligonucleotide"
  source 1..22: mol_type = other RNA
ncttcatgcctttctacagttt

SEQ ID NO: 1724 - RNA, 21 nt, synthetic construct
  misc_feature 1..21: note = source = /note="Description of Artificial Sequence: Synthetic oligonucleotide"
  source 1..21: mol_type = other RNA
actgtagaaaggcatgaagtt

SEQ ID NO: 1725 - RNA, 22 nt, synthetic construct
  modified_base 1: mod_base = OTHER; note = Inverted abasic nucleotide
  misc_feature 1..22: note = source = /note="Description of Artificial Sequence: Synthetic oligonucleotide"
  source 1..22: mol_type = other RNA
nttcctgcttcatgcctttcta

SEQ ID NO: 1726 - RNA, 23 nt, synthetic construct
  misc_feature 1..23: note = source = /note="Description of Artificial Sequence: Synthetic oligonucleotide"
  source 1..23: mol_type = other RNA
tagaaaggcatgaagcaggaatt

SEQ ID NO: 1727 - RNA, 21 nt, synthetic construct
  modified_base 21: mod_base = OTHER; note = Inverted abasic nucleotide
  misc_feature 1..21: note = source = /note="Description of Artificial Sequence: Synthetic oligonucleotide"
  source 1..21: mol_type = other RNA
ttcctgcttcatgcctttctn

SEQ ID NO: 1728 - RNA, 23 nt, synthetic construct
  misc_feature 1..23: note = source = /note="Description of Artificial Sequence: Synthetic oligonucleotide"
  source 1..23: mol_type = other RNA
tagaaaggcatgaagcaggaatt

SEQ ID NO: 1729 - RNA, 22 nt, synthetic construct
  modified_base 1: mod_base = OTHER; note = Inverted abasic nucleotide
  misc_feature 1..22: note = source = /note="Description of Artificial Sequence: Synthetic oligonucleotide"
  source 1..22: mol_type = other RNA
nttcctgcttcatgcctttcta

SEQ ID NO: 1730 - RNA, 23 nt, synthetic construct
  misc_feature 1..23: note = source = /note="Description of Artificial Sequence: Synthetic oligonucleotide"
  source 1..23: mol_type = other RNA
tagaaaggcatgaagcaggaatt

SEQ ID NO: 1731 - RNA, 21 nt, synthetic construct
  modified_base 21: mod_base = OTHER; note = Inverted abasic nucleotide
  misc_feature 1..21: note = source = /note="Description of Artificial Sequence: Synthetic oligonucleotide"
  source 1..21: mol_type = other RNA
ttcctgcttcatgcctttctn

SEQ ID NO: 1732 - RNA, 23 nt, synthetic construct
  misc_feature 1..23: note = source = /note="Description of Artificial Sequence: Synthetic oligonucleotide"
  source 1..23: mol_type = other RNA
tagaaaggcatgaagcaggaatt

SEQ ID NO: 1733 - RNA, 22 nt, synthetic construct
  modified_base 1: mod_base = OTHER; note = Inverted abasic nucleotide
  misc_feature 1..22: note = source = /note="Description of Artificial Sequence: Synthetic oligonucleotide"
  source 1..22: mol_type = other RNA
nttcctgcttcatgcctttcta

SEQ ID NO: 1734 - RNA, 23 nt, synthetic construct
  misc_feature 1..23: note = source = /note="Description of Artificial Sequence: Synthetic oligonucleotide"
  source 1..23: mol_type = other RNA
tagaaaggcatgaagcaggaatt

SEQ ID NO: 1735 - RNA, 22 nt, synthetic construct
  modified_base 1: mod_base = OTHER; note = Inverted abasic nucleotide
  misc_feature 1..22: note = source = /note="Description of Artificial Sequence: Synthetic oligonucleotide"
  source 1..22: mol_type = other RNA
nttcctgcttcatgcctttcta

SEQ ID NO: 1736 - RNA, 23 nt, synthetic construct
  misc_feature 1..23: note = source = /note="Description of Artificial Sequence: Synthetic oligonucleotide"
  source 1..23: mol_type = other RNA
tagaaaggcatgaagcaggaatt

SEQ ID NO: 1737 - RNA, 22 nt, synthetic construct
  modified_base 1: mod_base = OTHER; note = Inverted abasic nucleotide
  misc_feature 1..22: note = source = /note="Description of Artificial Sequence: Synthetic oligonucleotide"
  source 1..22: mol_type = other RNA
nttcctgcttcatgcctttcta

SEQ ID NO: 1738 - RNA, 23 nt, synthetic construct
  misc_feature 1..23: note = source = /note="Description of Artificial Sequence: Synthetic oligonucleotide"
  source 1..23: mol_type = other RNA
tagaaaggcatgaagcaggaatt

SEQ ID NO: 1739 - RNA, 22 nt, synthetic construct
  modified_base 1: mod_base = OTHER; note = Inverted abasic nucleotide
  misc_feature 1..22: note = source = /note="Description of Artificial Sequence: Synthetic oligonucleotide"
  source 1..22: mol_type = other RNA
nttcctgcttcatgcctttcta

SEQ ID NO: 1740 - RNA, 23 nt, synthetic construct
  misc_feature 1..23: note = source = /note="Description of Artificial Sequence: Synthetic oligonucleotide"
  source 1..23: mol_type = other RNA
tagaaaggcatgaagcaggaatt

SEQ ID NO: 1741 - RNA, 22 nt, synthetic construct
  modified_base 1: mod_base = OTHER; note = Inverted abasic nucleotide
  misc_feature 1..22: note = source = /note="Description of Artificial Sequence: Synthetic oligonucleotide"
  source 1..22: mol_type = other RNA
nttcctgcttcatgcctttcta

SEQ ID NO: 1742 - RNA, 23 nt, synthetic construct
  misc_feature 1..23: note = source = /note="Description of Artificial Sequence: Synthetic oligonucleotide"
  source 1..23: mol_type = other RNA
tagaaaggcatgaagcaggaatt

SEQ ID NO: 1743 - RNA, 22 nt, synthetic construct
  modified_base 1: mod_base = OTHER; note = Inverted abasic nucleotide
  misc_feature 1..22: note = source = /note="Description of Artificial Sequence: Synthetic oligonucleotide"
  source 1..22: mol_type = other RNA
nttcctgcttcatgcctttcta

SEQ ID NO: 1744 - RNA, 23 nt, synthetic construct
  misc_feature 1..23: note = source = /note="Description of Artificial Sequence: Synthetic oligonucleotide"
  source 1..23: mol_type = other RNA
tagaaaggcatgaagcaggaatt

SEQ ID NO: 1745 - RNA, 22 nt, synthetic construct
  modified_base 1: mod_base = OTHER; note = Inverted abasic nucleotide
  misc_feature 1..22: note = source = /note="Description of Artificial Sequence: Synthetic oligonucleotide"
  source 1..22: mol_type = other RNA
ntcatgcctttctacagtggct

SEQ ID NO: 1746 - RNA, 23 nt, synthetic construct
  misc_feature 1..23: note = source = /note="Description of Artificial Sequence: Synthetic oligonucleotide"
  source 1..23: mol_type = other RNA
agccactgtagaaaggcatgatt

SEQ ID NO: 1747 - RNA, 21 nt, synthetic construct
  modified_base 21: mod_base = OTHER; note = Inverted abasic nucleotide
  misc_feature 1..21: note = source = /note="Description of Artificial Sequence: Synthetic oligonucleotide"
  source 1..21: mol_type = other RNA
tcatgcctttctacagtggcn

SEQ ID NO: 1748 - RNA, 23 nt, synthetic construct
  misc_feature 1..23: note = source = /note="Description of Artificial Sequence: Synthetic oligonucleotide"
  source 1..23: mol_type = other RNA
agccactgtagaaaggcatgatt

SEQ ID NO: 1749 - RNA, 22 nt, synthetic construct
  modified_base 1: mod_base = OTHER; note = Inverted abasic nucleotide
  misc_feature 1..22: note = source = /note="Description of Artificial Sequence: Synthetic oligonucleotide"
  source 1..22: mol_type = other RNA
ntcatgcctttctacagtggct

SEQ ID NO: 1750 - RNA, 23 nt, synthetic construct
  misc_feature 1..23: note = source = /note="Description of Artificial Sequence: Synthetic oligonucleotide"
  source 1..23: mol_type = other RNA
agccactgtagaaaggcatgatt

SEQ ID NO: 1751 - RNA, 21 nt, synthetic construct
  modified_base 21: mod_base = OTHER; note = Inverted abasic nucleotide
  misc_feature 1..21: note = source = /note="Description of Artificial Sequence: Synthetic oligonucleotide"
  source 1..21: mol_type = other RNA
tcatgcctttctacagtggcn

SEQ ID NO: 1752 - RNA, 23 nt, synthetic construct
  misc_feature 1..23: note = source = /note="Description of Artificial Sequence: Synthetic oligonucleotide"
  source 1..23: mol_type = other RNA
agccactgtagaaaggcatgatt

SEQ ID NO: 1753 - RNA, 22 nt, synthetic construct
  modified_base 1: mod_base = OTHER; note = Inverted abasic nucleotide
  misc_feature 1..22: note = source = /note="Description of Artificial Sequence: Synthetic oligonucleotide"
  source 1..22: mol_type = other RNA
ntcatgcctttctacagtggct

SEQ ID NO: 1754 - RNA, 23 nt, synthetic construct
  misc_feature 1..23: note = source = /note="Description of Artificial Sequence: Synthetic oligonucleotide"
  source 1..23: mol_type = other RNA
agccactgtagaaaggcatgatt

SEQ ID NO: 1755 - RNA, 22 nt, synthetic construct
  modified_base 1: mod_base = OTHER; note = Inverted abasic nucleotide
  misc_feature 1..22: note = source = /note="Description of Artificial Sequence: Synthetic oligonucleotide"
  source 1..22: mol_type = other RNA
ntcatgcctttctacagtggct

SEQ ID NO: 1756 - RNA, 23 nt, synthetic construct
  misc_feature 1..23: note = source = /note="Description of Artificial Sequence: Synthetic oligonucleotide"
  source 1..23: mol_type = other RNA
agccactgtagaaaggcatgatt

SEQ ID NO: 1757 - RNA, 21 nt, synthetic construct
  modified_base 21: mod_base = OTHER; note = Inverted abasic nucleotide
  misc_feature 1..21: note = source = /note="Description of Artificial Sequence: Synthetic oligonucleotide"
  source 1..21: mol_type = other RNA
tcatgcctttctacagtggcn

SEQ ID NO: 1758 - RNA, 23 nt, synthetic construct
  misc_feature 1..23: note = source = /note="Description of Artificial Sequence: Synthetic oligonucleotide"
  source 1..23: mol_type = other RNA
agccactgtagaaaggcatgatt

SEQ ID NO: 1759 - RNA, 22 nt, synthetic construct
  modified_base 1: mod_base = OTHER; note = Inverted abasic nucleotide
  misc_feature 1..22: note = source = /note="Description of Artificial Sequence: Synthetic oligonucleotide"
  source 1..22: mol_type = other RNA
ntcatgcctttctacagtggct

SEQ ID NO: 1760 - RNA, 23 nt, synthetic construct
  misc_feature 1..23: note = source = /note="Description of Artificial Sequence: Synthetic oligonucleotide"
  source 1..23: mol_type = other RNA
agccactgtagaaaggcatgatt

SEQ ID NO: 1761 - RNA, 22 nt, synthetic construct
  modified_base 1: mod_base = OTHER; note = Inverted abasic nucleotide
  misc_feature 1..22: note = source = /note="Description of Artificial Sequence: Synthetic oligonucleotide"
  source 1..22: mol_type = other RNA
ntcatgcctttctacagtggct

SEQ ID NO: 1762 - RNA, 23 nt, synthetic construct
  misc_feature 1..23: note = source = /note="Description of Artificial Sequence: Synthetic oligonucleotide"
  source 1..23: mol_type = other RNA
agccactgtagaaaggcatgatt

SEQ ID NO: 1763 - RNA, 22 nt, synthetic construct
  modified_base 1: mod_base = OTHER; note = Inverted abasic nucleotide
  misc_feature 1..22: note = source = /note="Description of Artificial Sequence: Synthetic oligonucleotide"
  source 1..22: mol_type = other RNA
ntcatgcctttctacagtggct

SEQ ID NO: 1764 - RNA, 23 nt, synthetic construct
  misc_feature 1..23: note = source = /note="Description of Artificial Sequence: Synthetic oligonucleotide"
  source 1..23: mol_type = other RNA
agccactgtagaaaggcatgatt

SEQ ID NO: 1765 - RNA, 22 nt, synthetic construct
  modified_base 1: mod_base = OTHER; note = Inverted abasic nucleotide
  misc_feature 1..22: note = source = /note="Description of Artificial Sequence: Synthetic oligonucleotide"
  source 1..22: mol_type = other RNA
ntgcttcatgcctttctacagt

SEQ ID NO: 1766 - RNA, 23 nt, synthetic construct
  misc_feature 1..23: note = source = /note="Description of Artificial Sequence: Synthetic oligonucleotide"
  source 1..23: mol_type = other RNA
actgtagaaaggcatgaagcatt

SEQ ID NO: 1767 - RNA, 21 nt, synthetic construct
  modified_base 21: mod_base = OTHER; note = Inverted abasic nucleotide
  misc_feature 1..21: note = source = /note="Description of Artificial Sequence: Synthetic oligonucleotide"
  source 1..21: mol_type = other RNA
tgcttcatgcctttctacagn

SEQ ID NO: 1768 - RNA, 23 nt, synthetic construct
  misc_feature 1..23: note = source = /note="Description of Artificial Sequence: Synthetic oligonucleotide"
  source 1..23: mol_type = other RNA
actgtagaaaggcatgaagcatt

SEQ ID NO: 1769 - RNA, 21 nt, synthetic construct
  modified_base 21: mod_base = OTHER; note = Inverted abasic nucleotide
  misc_feature 1..21: note = source = /note="Description of Artificial Sequence: Synthetic oligonucleotide"
  source 1..21: mol_type = other RNA
tgcttcatgcctttctacagn

SEQ ID NO: 1770 - RNA, 23 nt, synthetic construct
  misc_feature 1..23: note = source = /note="Description of Artificial Sequence: Synthetic oligonucleotide"
  source 1..23: mol_type = other RNA
actgtagaaaggcatgaagcatt

SEQ ID NO: 1771 - RNA, 22 nt, synthetic construct
  modified_base 1: mod_base = OTHER; note = Inverted abasic nucleotide
  misc_feature 1..22: note = source = /note="Description of Artificial Sequence: Synthetic oligonucleotide"
  source 1..22: mol_type = other RNA
ntgcttcatgcctttctacagt

SEQ ID NO: 1772 - RNA, 23 nt, synthetic construct
  misc_feature 1..23: note = source = /note="Description of Artificial Sequence: Synthetic oligonucleotide"
  source 1..23: mol_type = other RNA
actgtagaaaggcatgaagcatt

SEQ ID NO: 1773 - RNA, 22 nt, synthetic construct
  modified_base 1: mod_base = OTHER; note = Inverted abasic nucleotide
  misc_feature 1..22: note = source = /note="Description of Artificial Sequence: Synthetic oligonucleotide"
  source 1..22: mol_type = other RNA
ncttcatgcctttctacagttt

SEQ ID NO: 1774 - RNA, 21 nt, synthetic construct
  misc_feature 1..21: note = source = /note="Description of Artificial Sequence: Synthetic oligonucleotide"
  source 1..21: mol_type = other RNA
actgtagaaaggcatgaagtt

SEQ ID NO: 1775 - RNA, 22 nt, synthetic construct
  modified_base 1: mod_base = OTHER; note = Inverted abasic nucleotide
  misc_feature 1..22: note = source = /note="Description of Artificial Sequence: Synthetic oligonucleotide"
  source 1..22: mol_type = other RNA
ntgcttcatgcctttctacagt

SEQ ID NO: 1776 - RNA, 23 nt, synthetic construct
  misc_feature 1..23: note = source = /note="Description of Artificial Sequence: Synthetic oligonucleotide"
  source 1..23: mol_type = other RNA
actgtagaaaggcatgaagcatt

SEQ ID NO: 1777 - RNA, 22 nt, synthetic construct
  modified_base 1: mod_base = OTHER; note = Inverted abasic nucleotide
  misc_feature 1..22: note = source = /note="Description of Artificial Sequence: Synthetic oligonucleotide"
  source 1..22: mol_type = other RNA
ngcttcatgcctttctacattt

SEQ ID NO: 1778 - RNA, 21 nt, synthetic construct
  misc_feature 1..21: note = source = /note="Description of Artificial Sequence: Synthetic oligonucleotide"
  source 1..21: mol_type = other RNA
atgtagaaaggcatgaagctt

SEQ ID NO: 1779 - RNA, 22 nt, synthetic construct
  modified_base 1: mod_base = OTHER; note = Inverted abasic nucleotide
  misc_feature 1..22: note = source = /note="Description of Artificial Sequence: Synthetic oligonucleotide"
  source 1..22: mol_type = other RNA
ncatgcctttctacagtggttt

SEQ ID NO: 1780 - RNA, 21 nt, synthetic construct
  misc_feature 1..21: note = source = /note="Description of Artificial Sequence: Synthetic oligonucleotide"
  source 1..21: mol_type = other RNA
accactgtagaaaggcatgtt

SEQ ID NO: 1781 - RNA, 22 nt, synthetic construct
  modified_base 1: mod_base = OTHER; note = Inverted abasic nucleotide
  misc_feature 1..22: note = source = /note="Description of Artificial Sequence: Synthetic oligonucleotide"
  source 1..22: mol_type = other RNA
nctgcttcatgcctttctaatt

SEQ ID NO: 1782 - RNA, 21 nt, synthetic construct
  misc_feature 1..21: note = source = /note="Description of Artificial Sequence: Synthetic oligonucleotide"
  source 1..21: mol_type = other RNA
ttagaaaggcatgaagcagtt

SEQ ID NO: 1783 - RNA, 22 nt, synthetic construct
  modified_base 1: mod_base = OTHER; note = Inverted abasic nucleotide
  misc_feature 1..22: note = source = /note="Description of Artificial Sequence: Synthetic oligonucleotide"
  source 1..22: mol_type = other RNA
ngcttcatgcctttctacaatt

SEQ ID NO: 1784 - RNA, 21 nt, synthetic construct
  misc_feature 1..21: note = source = /note="Description of Artificial Sequence: Synthetic oligonucleotide"
  source 1..21: mol_type = other RNA
ttgtagaaaggcatgaagctt

SEQ ID NO: 1785 - RNA, 22 nt, synthetic construct
  modified_base 1: mod_base = OTHER; note = Inverted abasic nucleotide
  misc_feature 1..22: note = source = /note="Description of Artificial Sequence: Synthetic oligonucleotide"
  source 1..22: mol_type = other RNA
nttcatgcctttctacagtatt

SEQ ID NO: 1786 - RNA, 21 nt, synthetic construct
  misc_feature 1..21: note = source = /note="Description of Artificial Sequence: Synthetic oligonucleotide"
  source 1..21: mol_type = other RNA
tactgtagaaaggcatgaatt

SEQ ID NO: 1787 - RNA, 22 nt, synthetic construct
  modified_base 1: mod_base = OTHER; note = Inverted abasic nucleotide
  misc_feature 1..22: note = source = /note="Description of Artificial Sequence: Synthetic oligonucleotide"
  source 1..22: mol_type = other RNA
ngttcctgcttcatgccttttt

SEQ ID NO: 1788 - RNA, 21 nt, synthetic construct
  misc_feature 1..21: note = source = /note="Description of Artificial Sequence: Synthetic oligonucleotide"
  source 1..21: mol_type = other RNA
aaaggcatgaagcaggaactt

SEQ ID NO: 1789 - RNA, 21 nt, synthetic construct
  modified_base 21: mod_base = OTHER; note = Inverted abasic nucleotide
  misc_feature 1..21: note = source = /note="Description of Artificial Sequence: Synthetic oligonucleotide"
  source 1..21: mol_type = other RNA
atgttcctgcttcatgccttn

SEQ ID NO: 1790 - RNA, 23 nt, synthetic construct
  misc_feature 1..23: note = source = /note="Description of Artificial Sequence: Synthetic oligonucleotide"
  source 1..23: mol_type = other RNA
aaaggcatgaagcaggaacattt

SEQ ID NO: 1791 - RNA, 22 nt, synthetic construct
  modified_base 1: mod_base = OTHER; note = Inverted abasic nucleotide
  misc_feature 1..22: note = source = /note="Description of Artificial Sequence: Synthetic oligonucleotide"
  source 1..22: mol_type = other RNA
natgttcctgcttcatgccttt

SEQ ID NO: 1792 - RNA, 23 nt, synthetic construct
  misc_feature 1..23: note = source = /note="Description of Artificial Sequence: Synthetic oligonucleotide"
  source 1..23: mol_type = other RNA
aaaggcatgaagcaggaacattt

SEQ ID NO: 1793 - RNA, 22 nt, synthetic construct
  modified_base 1: mod_base = OTHER; note = Inverted abasic nucleotide
  misc_feature 1..22: note = source = /note="Description of Artificial Sequence: Synthetic oligonucleotide"
  source 1..22: mol_type = other RNA
ngttcctgcttcatgccttttt

SEQ ID NO: 1794 - RNA, 21 nt, synthetic construct
  misc_feature 1..21: note = source = /note="Description of Artificial Sequence: Synthetic oligonucleotide"
  source 1..21: mol_type = other RNA
aaaggcatgaagcaggaactt

SEQ ID NO: 1795 - RNA, 21 nt, synthetic construct
  modified_base 21: mod_base = OTHER; note = Inverted abasic nucleotide
  misc_feature 1..21: note = source = /note="Description of Artificial Sequence: Synthetic oligonucleotide"
  source 1..21: mol_type = other RNA
atgttcctgcttcatgccttn

SEQ ID NO: 1796 - RNA, 23 nt, synthetic construct
  misc_feature 1..23: note = source = /note="Description of Artificial Sequence: Synthetic oligonucleotide"
  source 1..23: mol_type = other RNA
aaaggcatgaagcaggaacattt

SEQ ID NO: 1797 - RNA, 22 nt, synthetic construct
  modified_base 1: mod_base = OTHER; note = Inverted abasic nucleotide
  misc_feature 1..22: note = source = /note="Description of Artificial Sequence: Synthetic oligonucleotide"
  source 1..22: mol_type = other RNA
natgttcctgcttcatgccttt

SEQ ID NO: 1798 - RNA, 23 nt, synthetic construct
  misc_feature 1..23: note = source = /note="Description of Artificial Sequence: Synthetic oligonucleotide"
  source 1..23: mol_type = other RNA
aaaggcatgaagcaggaacattt

SEQ ID NO: 1799 - RNA, 22 nt, synthetic construct
  modified_base 1: mod_base = OTHER; note = Inverted abasic nucleotide
  misc_feature 1..22: note = source = /note="Description of Artificial Sequence: Synthetic oligonucleotide"
  source 1..22: mol_type = other RNA
ngttcctgcttcatgccttttt

SEQ ID NO: 1800 - RNA, 21 nt, synthetic construct
  misc_feature 1..21: note = source = /note="Description of Artificial Sequence: Synthetic oligonucleotide"
  source 1..21: mol_type = other RNA
aaaggcatgaagcaggaactt

SEQ ID NO: 1801 - RNA, 21 nt, synthetic construct
  modified_base 21: mod_base = OTHER; note = Inverted abasic nucleotide
  misc_feature 1..21: note = source = /note="Description of Artificial Sequence: Synthetic oligonucleotide"
  source 1..21: mol_type = other RNA
atgttcctgcttcatgccttn

SEQ ID NO: 1802 - RNA, 23 nt, synthetic construct
  misc_feature 1..23: note = source = /note="Description of Artificial Sequence: Synthetic oligonucleotide"
  source 1..23: mol_type = other RNA
aaaggcatgaagcaggaacattt

SEQ ID NO: 1803 - RNA, 22 nt, synthetic construct
  modified_base 1: mod_base = OTHER; note = Inverted abasic nucleotide
  misc_feature 1..22: note = source = /note="Description of Artificial Sequence: Synthetic oligonucleotide"
  source 1..22: mol_type = other RNA
natgttcctgcttcatgccttt

SEQ ID NO: 1804 - RNA, 23 nt, synthetic construct
  misc_feature 1..23: note = source = /note="Description of Artificial Sequence: Synthetic oligonucleotide"
  source 1..23: mol_type = other RNA
aaaggcatgaagcaggaacattt

SEQ ID NO: 1805 - RNA, 22 nt, synthetic construct
  modified_base 1: mod_base = OTHER; note = Inverted abasic nucleotide
  misc_feature 1..22: note = source = /note="Description of Artificial Sequence: Synthetic oligonucleotide"
  source 1..22: mol_type = other RNA
natgttcctgcttcatgccttt

SEQ ID NO: 1806 - RNA, 23 nt, synthetic construct
  misc_feature 1..23: note = source = /note="Description of Artificial Sequence: Synthetic oligonucleotide"
  source 1..23: mol_type = other RNA
aaaggcatgaagcaggaacattt

SEQ ID NO: 1807 - RNA, 22 nt, synthetic construct
  modified_base 1: mod_base = OTHER; note = Inverted abasic nucleotide
  misc_feature 1..22: note = source = /note="Description of Artificial Sequence: Synthetic oligonucleotide"
  source 1..22: mol_type = other RNA
natgttcctgcttcatgccttt

SEQ ID NO: 1808 - RNA, 23 nt, synthetic construct
  misc_feature 1..23: note = source = /note="Description of Artificial Sequence: Synthetic oligonucleotide"
  source 1..23: mol_type = other RNA
aaaggcatgaagcaggaacattt

SEQ ID NO: 1809 - RNA, 22 nt, synthetic construct
  modified_base 1: mod_base = OTHER; note = Inverted abasic nucleotide
  misc_feature 1..22: note = source = /note="Description of Artificial Sequence: Synthetic oligonucleotide"
  source 1..22: mol_type = other RNA
ngcttcatgcctttctacagta

SEQ ID NO: 1810 - RNA, 23 nt, synthetic construct
  misc_feature 1..23: note = source = /note="Description of Artificial Sequence: Synthetic oligonucleotide"
  source 1..23: mol_type = other RNA
tactgtagaaaggcatgaagctt

SEQ ID NO: 1811 - RNA, 22 nt, synthetic construct
  modified_base 1: mod_base = OTHER; note = Inverted abasic nucleotide
  misc_feature 1..22: note = source = /note="Description of Artificial Sequence: Synthetic oligonucleotide"
  source 1..22: mol_type = other RNA
ngcttcatgcctttctacagta

SEQ ID NO: 1812 - RNA, 23 nt, synthetic construct
  misc_feature 1..23: note = source = /note="Description of Artificial Sequence: Synthetic oligonucleotide"
  source 1..23: mol_type = other RNA
tactgtagaaaggcatgaagctt

SEQ ID NO: 1813 - RNA, 22 nt, synthetic construct
  modified_base 1: mod_base = OTHER; note = Inverted abasic nucleotide
  misc_feature 1..22: note = source = /note="Description of Artificial Sequence: Synthetic oligonucleotide"
  source 1..22: mol_type = other RNA
nttcatgcctttctacagtatt

SEQ ID NO: 1814 - RNA, 21 nt, synthetic construct
  misc_feature 1..21: note = source = /note="Description of Artificial Sequence: Synthetic oligonucleotide"
  source 1..21: mol_type = other RNA
tactgtagaaaggcatgaatt

SEQ ID NO: 1815 - RNA, 22 nt, synthetic construct
  modified_base 1: mod_base = OTHER; note = Inverted abasic nucleotide
  misc_feature 1..22: note = source = /note="Description of Artificial Sequence: Synthetic oligonucleotide"
  source 1..22: mol_type = other RNA
ngcttcatgcctttctacagta

SEQ ID NO: 1816 - RNA, 23 nt, synthetic construct
  misc_feature 1..23: note = source = /note="Description of Artificial Sequence: Synthetic oligonucleotide"
  source 1..23: mol_type = other RNA
tactgtagaaaggcatgaagctt

SEQ ID NO: 1817 - RNA, 21 nt, synthetic construct
  modified_base 21: mod_base = OTHER; note = Inverted abasic nucleotide
  misc_feature 1..21: note = source = /note="Description of Artificial Sequence: Synthetic oligonucleotide"
  source 1..21: mol_type = other RNA
gcttcatgcctttctacagtn

SEQ ID NO: 1818 - RNA, 23 nt, synthetic construct
  misc_feature 1..23: note = source = /note="Description of Artificial Sequence: Synthetic oligonucleotide"
  source 1..23: mol_type = other RNA
tactgtagaaaggcatgaagctt

SEQ ID NO: 1819 - RNA, 22 nt, synthetic construct
  modified_base 1: mod_base = OTHER; note = Inverted abasic nucleotide
  misc_feature 1..22: note = source = /note="Description of Artificial Sequence: Synthetic oligonucleotide"
  source 1..22: mol_type = other RNA
ngcggcttcctgggcttctatt

SEQ ID NO: 1820 - RNA, 21 nt, synthetic construct
  misc_feature 1..21: note = source = /note="Description of Artificial Sequence: Synthetic oligonucleotide"
  source 1..21: mol_type = other RNA
tagaagcccaggaagccgctt

SEQ ID NO: 1821 - RNA, 22 nt, synthetic construct
  modified_base 1: mod_base = OTHER; note = Inverted abasic nucleotide
  misc_feature 1..22: note = source = /note="Description of Artificial Sequence: Synthetic oligonucleotide"
  source 1..22: mol_type = other RNA
natggcttccagatatgccttt

SEQ ID NO: 1822 - RNA, 21 nt, synthetic construct
  misc_feature 1..21: note = source = /note="Description of Artificial Sequence: Synthetic oligonucleotide"
  source 1..21: mol_type = other RNA
aggcatatctggaagccattt

SEQ ID NO: 1823 - RNA, 22 nt, synthetic construct
  modified_base 1: mod_base = OTHER; note = Inverted abasic nucleotide
  misc_feature 1..22: note = source = /note="Description of Artificial Sequence: Synthetic oligonucleotide"
  source 1..22: mol_type = other RNA
nacatggcttccagatatgcct

SEQ ID NO: 1824 - RNA, 23 nt, synthetic construct
  misc_feature 1..23: note = source = /note="Description of Artificial Sequence: Synthetic oligonucleotide"
  source 1..23: mol_type = other RNA
aggcatatctggaagccatgttt

SEQ ID NO: 1825 - RNA, 22 nt, synthetic construct
  modified_base 1: mod_base = OTHER; note = Inverted abasic nucleotide
  misc_feature 1..22: note = source = /note="Description of Artificial Sequence: Synthetic oligonucleotide"
  source 1..22: mol_type = other RNA
nacatggcttccagatatgcct

SEQ ID NO: 1826 - RNA, 23 nt, synthetic construct
  misc_feature 1..23: note = source = /note="Description of Artificial Sequence: Synthetic oligonucleotide"
  source 1..23: mol_type = other RNA
aggcatatctggaagccatgttt

SEQ ID NO: 1827 - RNA, 22 nt, synthetic construct
  modified_base 1: mod_base = OTHER; note = Inverted abasic nucleotide
  misc_feature 1..22: note = source = /note="Description of Artificial Sequence: Synthetic oligonucleotide"
  source 1..22: mol_type = other RNA
ncaacgtacccttcattgatgt

SEQ ID NO: 1828 - RNA, 23 nt, synthetic construct
  misc_feature 1..23: note = source = /note="Description of Artificial Sequence: Synthetic oligonucleotide"
  source 1..23: mol_type = other RNA
acatcaatgaagggtacgttgtt

SEQ ID NO: 1829 - RNA, 22 nt, synthetic construct
  modified_base 1: mod_base = OTHER; note = Inverted abasic nucleotide
  misc_feature 1..22: note = source = /note="Description of Artificial Sequence: Synthetic oligonucleotide"
  source 1..22: mol_type = other RNA
ncaacgtacccttcattgatgt

SEQ ID NO: 1830 - RNA, 23 nt, synthetic construct
  misc_feature 1..23: note = source = /note="Description of Artificial Sequence: Synthetic oligonucleotide"
  source 1..23: mol_type = other RNA
acatcaatgaagggtacgttgtt

SEQ ID NO: 1831 - RNA, 22 nt, synthetic construct
  modified_base 1: mod_base = OTHER; note = Inverted abasic nucleotide
  misc_feature 1..22: note = source = /note="Description of Artificial Sequence: Synthetic oligonucleotide"
  source 1..22: mol_type = other RNA
nacgtacccttcattgatgttt

SEQ ID NO: 1832 - RNA, 21 nt, synthetic construct
  misc_feature 1..21: note = source = /note="Description of Artificial Sequence: Synthetic oligonucleotide"
  source 1..21: mol_type = other RNA
acatcaatgaagggtacgttt

SEQ ID NO: 1833 - RNA, 21 nt, synthetic construct
  modified_base 21: mod_base = OTHER; note = Inverted abasic nucleotide
  misc_feature 1..21: note = source = /note="Description of Artificial Sequence: Synthetic oligonucleotide"
  source 1..21: mol_type = other RNA
ctgcttcatgcctttctacan

SEQ ID NO: 1834 - RNA, 23 nt, synthetic construct
  misc_feature 1..23: note = source = /note="Description of Artificial Sequence: Synthetic oligonucleotide"
  source 1..23: mol_type = other RNA
atgtagaaaggcatgaagcagtt

SEQ ID NO: 1835 - RNA, 22 nt, synthetic construct
  modified_base 1: mod_base = OTHER; note = Inverted abasic nucleotide
  misc_feature 1..22: note = source = /note="Description of Artificial Sequence: Synthetic oligonucleotide"
  source 1..22: mol_type = other RNA
nctgcttcatgcctttctacat

SEQ ID NO: 1836 - RNA, 23 nt, synthetic construct
  misc_feature 1..23: note = source = /note="Description of Artificial Sequence: Synthetic oligonucleotide"
  source 1..23: mol_type = other RNA
atgtagaaaggcatgaagcagtt

SEQ ID NO: 1837 - RNA, 22 nt, synthetic construct
  modified_base 1: mod_base = OTHER; note = Inverted abasic nucleotide
  misc_feature 1..22: note = source = /note="Description of Artificial Sequence: Synthetic oligonucleotide"
  source 1..22: mol_type = other RNA
ngcttcatgcctttctacattt

SEQ ID NO: 1838 - RNA, 21 nt, synthetic construct
  misc_feature 1..21: note = source = /note="Description of Artificial Sequence: Synthetic oligonucleotide"
  source 1..21: mol_type = other RNA
atgtagaaaggcatgaagctt

SEQ ID NO: 1839 - RNA, 21 nt, synthetic construct
  modified_base 21: mod_base = OTHER; note = Inverted abasic nucleotide
  misc_feature 1..21: note = source = /note="Description of Artificial Sequence: Synthetic oligonucleotide"
  source 1..21: mol_type = other RNA
ctgcttcatgcctttctacan

SEQ ID NO: 1840 - RNA, 23 nt, synthetic construct
  misc_feature 1..23: note = source = /note="Description of Artificial Sequence: Synthetic oligonucleotide"
  source 1..23: mol_type = other RNA
atgtagaaaggcatgaagcagtt

SEQ ID NO: 1841 - RNA, 22 nt, synthetic construct
  modified_base 1: mod_base = OTHER; note = Inverted abasic nucleotide
  misc_feature 1..22: note = source = /note="Description of Artificial Sequence: Synthetic oligonucleotide"
  source 1..22: mol_type = other RNA
nctgcttcatgcctttctacat

SEQ ID NO: 1842 - RNA, 23 nt, synthetic construct
  misc_feature 1..23: note = source = /note="Description of Artificial Sequence: Synthetic oligonucleotide"
  source 1..23: mol_type = other RNA
atgtagaaaggcatgaagcagtt

SEQ ID NO: 1843 - RNA, 21 nt, synthetic construct
  modified_base 21: mod_base = OTHER; note = Inverted abasic nucleotide
  misc_feature 1..21: note = source = /note="Description of Artificial Sequence: Synthetic oligonucleotide"
  source 1..21: mol_type = other RNA
ctgcttcatgcctttctacan

SEQ ID NO: 1844 - RNA, 23 nt, synthetic construct
  misc_feature 1..23: note = source = /note="Description of Artificial Sequence: Synthetic oligonucleotide"
  source 1..23: mol_type = other RNA
atgtagaaaggcatgaagcagtt

SEQ ID NO: 1845 - RNA, 22 nt, synthetic construct
  modified_base 1: mod_base = OTHER; note = Inverted abasic nucleotide
  modified_base 22: mod_base = OTHER; note = Inverted abasic nucleotide
  misc_feature 1..22: note = source = /note="Description of Artificial Sequence: Synthetic oligonucleotide"
  source 1..22: mol_type = other RNA
nctgcttcatgcctttctacan

SEQ ID NO: 1846 - RNA, 23 nt, synthetic construct
  misc_feature 1..23: note = source = /note="Description of Artificial Sequence: Synthetic oligonucleotide"
  source 1..23: mol_type = other RNA
atgtagaaaggcatgaagcagtt

SEQ ID NO: 1847 - RNA, 22 nt, synthetic construct
  modified_base 1: mod_base = OTHER; note = Inverted abasic nucleotide
  misc_feature 1..22: note = source = /note="Description of Artificial Sequence: Synthetic oligonucleotide"
  source 1..22: mol_type = other RNA
ngcttcatgcctttctacattt

SEQ ID NO: 1848 - RNA, 21 nt, synthetic construct
  misc_feature 1..21: note = source = /note="Description of Artificial Sequence: Synthetic oligonucleotide"
  source 1..21: mol_type = other RNA
atgtagaaaggcatgaagctt

SEQ ID NO: 1849 - RNA, 22 nt, synthetic construct
  modified_base 1: mod_base = OTHER; note = Inverted abasic nucleotide
  misc_feature 1..22: note = source = /note="Description of Artificial Sequence: Synthetic oligonucleotide"
  source 1..22: mol_type = other RNA
ncttcatgcctttctacagttt

SEQ ID NO: 1850 - RNA, 21 nt, synthetic construct
  misc_feature 1..21: note = source = /note="Description of Artificial Sequence: Synthetic oligonucleotide"
  source 1..21: mol_type = other RNA
actgtagaaaggcatgaagtt

SEQ ID NO: 1851 - RNA, 21 nt, synthetic construct
  modified_base 21: mod_base = OTHER; note = Inverted abasic nucleotide
  misc_feature 1..21: note = source = /note="Description of Artificial Sequence: Synthetic oligonucleotide"
  source 1..21: mol_type = other RNA
tgcttcatgcctttctacagn

SEQ ID NO: 1852 - RNA, 23 nt, synthetic construct
  misc_feature 1..23: note = source = /note="Description of Artificial Sequence: Synthetic oligonucleotide"
  source 1..23: mol_type = other RNA
actgtagaaaggcatgaagcatt

SEQ ID NO: 1853 - RNA, 22 nt, synthetic construct
  modified_base 1: mod_base = OTHER; note = Inverted abasic nucleotide
  misc_feature 1..22: note = source = /note="Description of Artificial Sequence: Synthetic oligonucleotide"
  source 1..22: mol_type = other RNA
nctgcttcatgcctttctacat

SEQ ID NO: 1854 - RNA, 23 nt, synthetic construct
  misc_feature 1..23: note = source = /note="Description of Artificial Sequence: Synthetic oligonucleotide"
  source 1..23: mol_type = other RNA
atgtagaaaggcatgaagcagtt

SEQ ID NO: 1855 - RNA, 21 nt, synthetic construct
  modified_base 21: mod_base = OTHER; note = Inverted abasic nucleotide
  misc_feature 1..21: note = source = /note="Description of Artificial Sequence: Synthetic oligonucleotide"
  source 1..21: mol_type = other RNA
ctgcttcatgcctttctacan

SEQ ID NO: 1856 - RNA, 23 nt, synthetic construct
  misc_feature 1..23: note = source = /note="Description of Artificial Sequence: Synthetic oligonucleotide"
  source 1..23: mol_type = other RNA
atgtagaaaggcatgaagcagtt

SEQ ID NO: 1857 - RNA, 21 nt, synthetic construct
  modified_base 21: mod_base = OTHER; note = Inverted abasic nucleotide
  misc_feature 1..21: note = source = /note="Description of Artificial Sequence: Synthetic oligonucleotide"
  source 1..21: mol_type = other RNA
ctgcttcatgcctttctacan

SEQ ID NO: 1858 - RNA, 23 nt, synthetic construct
  misc_feature 1..23: note = source = /note="Description of Artificial Sequence: Synthetic oligonucleotide"
  source 1..23: mol_type = other RNA
atgtagaaaggcatgaagcagtt

SEQ ID NO: 1859 - RNA, 22 nt, synthetic construct
  modified_base 1: mod_base = OTHER; note = Inverted abasic nucleotide
  misc_feature 1..22: note = source = /note="Description of Artificial Sequence: Synthetic oligonucleotide"
  source 1..22: mol_type = other RNA
ncttcatccctttctacagttt

SEQ ID NO: 1860 - RNA, 21 nt, synthetic construct
  misc_feature 1..21: note = source = /note="Description of Artificial Sequence: Synthetic oligonucleotide"
  source 1..21: mol_type = other RNA
actgtagaaagggatgaagtt

SEQ ID NO: 1861 - RNA, 22 nt, synthetic construct
  modified_base 1: mod_base = OTHER; note = Inverted abasic nucleotide
  misc_feature 1..22: note = source = /note="Description of Artificial Sequence: Synthetic oligonucleotide"
  source 1..22: mol_type = other RNA
ngcttcatccctttctacattt

SEQ ID NO: 1862 - RNA, 21 nt, synthetic construct
  misc_feature 1..21: note = source = /note="Description of Artificial Sequence: Synthetic oligonucleotide"
  source 1..21: mol_type = other RNA
atgtagaaagggatgaagctt

SEQ ID NO: 1863 - RNA, 21 nt, synthetic construct
  modified_base 21: mod_base = OTHER; note = Inverted abasic nucleotide
  misc_feature 1..21: note = source = /note="Description of Artificial Sequence: Synthetic oligonucleotide"
  source 1..21: mol_type = other RNA
tgcttcatccctttctacagn

SEQ ID NO: 1864 - RNA, 23 nt, synthetic construct
  misc_feature 1..23: note = source = /note="Description of Artificial Sequence: Synthetic oligonucleotide"
  source 1..23: mol_type = other RNA
actgtagaaagggatgaagcatt

SEQ ID NO: 1865 - RNA, 21 nt, synthetic construct
  modified_base 21: mod_base = OTHER; note = Inverted abasic nucleotide
  misc_feature 1..21: note = source = /note="Description of Artificial Sequence: Synthetic oligonucleotide"
  source 1..21: mol_type = other RNA
ctgcttcatccctttctacan

SEQ ID NO: 1866 - RNA, 23 nt, synthetic construct
  misc_feature 1..23: note = source = /note="Description of Artificial Sequence: Synthetic oligonucleotide"
  source 1..23: mol_type = other RNA
atgtagaaagggatgaagcagtt

SEQ ID NO: 1867 - RNA, 22 nt, synthetic construct
  modified_base 1: mod_base = OTHER; note = Inverted abasic nucleotide
  misc_feature 1..22: note = source = /note="Description of Artificial Sequence: Synthetic oligonucleotide"
  source 1..22: mol_type = other RNA
nacattgctctttcacctgatt

SEQ ID NO: 1868 - RNA, 21 nt, synthetic construct
  misc_feature 1..21: note = source = /note="Description of Artificial Sequence: Synthetic oligonucleotide"
  source 1..21: mol_type = other RNA
tcaggtgaaagagcaatgttt

SEQ ID NO: 1869 - RNA, 21 nt, synthetic construct
  modified_base 21: mod_base = OTHER; note = Inverted abasic nucleotide
  misc_feature 1..21: note = source = /note="Description of Artificial Sequence: Synthetic oligonucleotide"
  source 1..21: mol_type = other RNA
ctgcttcatgcctttctacan

SEQ ID NO: 1870 - RNA, 23 nt, synthetic construct
  misc_feature 1..23: note = source = /note="Description of Artificial Sequence: Synthetic oligonucleotide"
  source 1..23: mol_type = other RNA
atgtagaaaggcatgaagcagtt

SEQ ID NO: 1871 - RNA, 21 nt, synthetic construct
  modified_base 21: mod_base = OTHER; note = Inverted abasic nucleotide
  misc_feature 1..21: note = source = /note="Description of Artificial Sequence: Synthetic oligonucleotide"
  source 1..21: mol_type = other RNA
ctgcttcatgcctttctacan

SEQ ID NO: 1872 - RNA, 23 nt, synthetic construct
  misc_feature 1..23: note = source = /note="Description of Artificial Sequence: Synthetic oligonucleotide"
  source 1..23: mol_type = other RNA
atgtagaaaggcatgaagcagtt

SEQ ID NO: 1873 - RNA, 21 nt, synthetic construct
  modified_base 21: mod_base = OTHER; note = Inverted abasic nucleotide
  misc_feature 1..21: note = source = /note="Description of Artificial Sequence: Synthetic oligonucleotide"
  source 1..21: mol_type = other RNA
ctgcttcatgcctttctacan

SEQ ID NO: 1874 - RNA, 23 nt, synthetic construct
  misc_feature 1..23: note = source = /note="Description of Artificial Sequence: Synthetic oligonucleotide"
  source 1..23: mol_type = other RNA
atgtagaaaggcatgaagcagtt

SEQ ID NO: 1875 - RNA, 21 nt, synthetic construct
  modified_base 21: mod_base = OTHER; note = Inverted abasic nucleotide
  misc_feature 1..21: note = source = /note="Description of Artificial Sequence: Synthetic oligonucleotide"
  source 1..21: mol_type = other RNA
ctgcttcatgcctttctacan

SEQ ID NO: 1876 - RNA, 23 nt, synthetic construct
  misc_feature 1..23: note = source = /note="Description of Artificial Sequence: Synthetic oligonucleotide"
  source 1..23: mol_type = other RNA
atgtagaaaggcatgaagcagtt

SEQ ID NO: 1877 - RNA, 21 nt, synthetic construct
  modified_base 21: mod_base = OTHER; note = Inverted abasic nucleotide
  misc_feature 1..21: note = source = /note="Description of Artificial Sequence: Synthetic oligonucleotide"
  source 1..21: mol_type = other RNA
ctgcttcatgcctttctacan

SEQ ID NO: 1878 - RNA, 23 nt, synthetic construct
  misc_feature 1..23: note = source = /note="Description of Artificial Sequence: Synthetic oligonucleotide"
  source 1..23: mol_type = other RNA
atgtagaaaggcatgaagcagtt

SEQ ID NO: 1879 - RNA, 21 nt, synthetic construct
  modified_base 21: mod_base = OTHER; note = Inverted abasic nucleotide
  misc_feature 1..21: note = source = /note="Description of Artificial Sequence: Synthetic oligonucleotide"
  source 1..21: mol_type = other RNA
ctgcttcatgcctttctacan

SEQ ID NO: 1880 - RNA, 23 nt, synthetic construct
  misc_feature 1..23: note = source = /note="Description of Artificial Sequence: Synthetic oligonucleotide"
  source 1..23: mol_type = other RNA
atgtagaaaggcatgaagcagtt

SEQ ID NO: 1881 - RNA, 21 nt, synthetic construct
  modified_base 21: mod_base = OTHER; note = Inverted abasic nucleotide
  misc_feature 1..21: note = source = /note="Description of Artificial Sequence: Synthetic oligonucleotide"
  source 1..21: mol_type = other RNA
ctgcttcatgcctttctacan

SEQ ID NO: 1882 - RNA, 23 nt, synthetic construct
  misc_feature 1..23: note = source = /note="Description of Artificial Sequence: Synthetic oligonucleotide"
  source 1..23: mol_type = other RNA
atgtagaaaggcatgaagcagtt

SEQ ID NO: 1883 - RNA, 21 nt, synthetic construct
  modified_base 21: mod_base = OTHER; note = Inverted abasic nucleotide
  misc_feature 1..21: note = source = /note="Description of Artificial Sequence: Synthetic oligonucleotide"
  source 1..21: mol_type = other RNA
ctgcttcatgcctttctacan

SEQ ID NO: 1884 - RNA, 23 nt, synthetic construct
  misc_feature 1..23: note = source = /note="Description of Artificial Sequence: Synthetic oligonucleotide"
  source 1..23: mol_type = other RNA
atgtagaaaggcatgaagcagtt

SEQ ID NO: 1885 - RNA, 21 nt, synthetic construct
  modified_base 21: mod_base = OTHER; note = Inverted abasic nucleotide
  misc_feature 1..21: note = source = /note="Description of Artificial Sequence: Synthetic oligonucleotide"
  source 1..21: mol_type = other RNA
ctgcttcatgcctttctacan

SEQ ID NO: 1886 - RNA, 23 nt, synthetic construct
  misc_feature 1..23: note = source = /note="Description of Artificial Sequence: Synthetic oligonucleotide"
  source 1..23: mol_type = other RNA
atgtagaaaggcatgaagcagtt

SEQ ID NO: 1887 - RNA, 21 nt, synthetic construct
  modified_base 21: mod_base = OTHER; note = Inverted abasic nucleotide
  misc_feature 1..21: note = source = /note="Description of Artificial Sequence: Synthetic oligonucleotide"
  source 1..21: mol_type = other RNA
ctgcttcatgcctttctacan

SEQ ID NO: 1888 - RNA, 23 nt, synthetic construct
  misc_feature 1..23: note = source = /note="Description of Artificial Sequence: Synthetic oligonucleotide"
  source 1..23: mol_type = other RNA
atgtagaaaggcatgaagcagtt

SEQ ID NO: 1889 - RNA, 21 nt, synthetic construct
  modified_base 21: mod_base = OTHER; note = Inverted abasic nucleotide
  misc_feature 1..21: note = source = /note="Description of Artificial Sequence: Synthetic oligonucleotide"
  source 1..21: mol_type = other RNA
ctgcttcatgcctttctacan

SEQ ID NO: 1890 - RNA, 23 nt, synthetic construct
  misc_feature 1..23: note = source = /note="Description of Artificial Sequence: Synthetic oligonucleotide"
  source 1..23: mol_type = other RNA
atgtagaaaggcatgaagcagtt

SEQ ID NO: 1891 - DNA, 22 bp, synthetic construct
  modified_base 1: mod_base = OTHER; note = Inverted abasic nucleotide
  misc_feature 1..22: note = source = /note="Description of Artificial Sequence: Synthetic oligonucleotide"
  misc_feature 1..22: note = source = /note="Description of Combined DNA/RNA Molecule: Synthetic oligonucleotide"
  source 1..22: mol_type = other DNA
ncttcatgcctttctacagttt

SEQ ID NO: 1892 - RNA, 21 nt, synthetic construct
  misc_feature 1..21: note = source = /note="Description of Artificial Sequence: Synthetic oligonucleotide"
  source 1..21: mol_type = other RNA
actgtagaaaggcatgaagtt

SEQ ID NO: 1893 - RNA, 22 nt, synthetic construct
  modified_base 1: mod_base = OTHER; note = Inverted abasic nucleotide
  misc_feature 1..22: note = source = /note="Description of Artificial Sequence: Synthetic oligonucleotide"
  source 1..22: mol_type = other RNA
ncttcatgcctttctacagttt

SEQ ID NO: 1894 - RNA, 21 nt, synthetic construct
  misc_feature 1..21: note = source = /note="Description of Artificial Sequence: Synthetic oligonucleotide"
  source 1..21: mol_type = other RNA
actgtagaaaggcatgaagtt

SEQ ID NO: 1895 - RNA, 22 nt, synthetic construct
  modified_base 1: mod_base = OTHER; note = Inverted abasic nucleotide
  misc_feature 1..22: note = source = /note="Description of Artificial Sequence: Synthetic oligonucleotide"
  source 1..22: mol_type = other RNA
ncttcatgcctttctacagttt

SEQ ID NO: 1896 - RNA, 21 nt, synthetic construct
  misc_feature 1..21: note = source = /note="Description of Artificial Sequence: Synthetic oligonucleotide"
  source 1..21: mol_type = other RNA
actgtagaaaggcatgaagtt

SEQ ID NO: 1897 - RNA, 22 nt, synthetic construct
  modified_base 1: mod_base = OTHER; note = Inverted abasic nucleotide
  misc_feature 1..22: note = source = /note="Description of Artificial Sequence: Synthetic oligonucleotide"
  source 1..22: mol_type = other RNA
ncttcatgcctttctacagttt

SEQ ID NO: 1898 - RNA, 21 nt, synthetic construct
  misc_feature 1..21: note = source = /note="Description of Artificial Sequence: Synthetic oligonucleotide"
  source 1..21: mol_type = other RNA
actgtagaaaggcatgaagtt

SEQ ID NO: 1899 - RNA, 22 nt, synthetic construct
  modified_base 1: mod_base = OTHER; note = Inverted abasic nucleotide
  misc_feature 1..22: note = source = /note="Description of Artificial Sequence: Synthetic oligonucleotide"
  source 1..22: mol_type = other RNA
ncttcatgcctttctacagttt

SEQ ID NO: 1900 - RNA, 21 nt, synthetic construct
  misc_feature 1..21: note = source = /note="Description of Artificial Sequence: Synthetic oligonucleotide"
  source 1..21: mol_type = other RNA
actgtagaaaggcatgaagtt

SEQ ID NO: 1901 - DNA, 21 bp, synthetic construct
  modified_base 1: mod_base = OTHER; note = Inverted abasic nucleotide
  misc_feature 1..21: note = source = /note="Description of Artificial Sequence: Synthetic oligonucleotide"
  misc_feature 1..21: note = source = /note="Description of Combined DNA/RNA Molecule: Synthetic oligonucleotide"
  source 1..21: mol_type = other DNA
nctcatgcctttctacagttt

SEQ ID NO: 1902 - RNA, 21 nt, synthetic construct
  misc_feature 1..21: note = source = /note="Description of Artificial Sequence: Synthetic oligonucleotide"
  source 1..21: mol_type = other RNA
actgtagaaaggcatgaagtt

SEQ ID NO: 1903 - DNA, 22 bp, synthetic construct
  modified_base 1: mod_base = OTHER; note = Inverted abasic nucleotide
  misc_feature 1..22: note = source = /note="Description of Artificial Sequence: Synthetic oligonucleotide"
  misc_feature 1..22: note = source = /note="Description of Combined DNA/RNA Molecule: Synthetic oligonucleotide"
  source 1..22: mol_type = other DNA
ncttcatgcctttctacagttt

SEQ ID NO: 1904 - RNA, 21 nt, synthetic construct
  misc_feature 1..21: note = source = /note="Description of Artificial Sequence: Synthetic oligonucleotide"
  source 1..21: mol_type = other RNA
actgtagaaaggcatgaagtt

SEQ ID NO: 1905 - RNA, 22 nt, synthetic construct
  modified_base 1: mod_base = OTHER; note = Inverted abasic nucleotide
  misc_feature 1..22: note = source = /note="Description of Artificial Sequence: Synthetic oligonucleotide"
  source 1..22: mol_type = other RNA
ngcttcatgggattctacattt

SEQ ID NO: 1906 - RNA, 21 nt, synthetic construct
  misc_feature 1..21: note = source = /note="Description of Artificial Sequence: Synthetic oligonucleotide"
  source 1..21: mol_type = other RNA
atgtagaatcccatgaagctt

SEQ ID NO: 1907 - RNA, 22 nt, synthetic construct
  modified_base 1: mod_base = OTHER; note = Inverted abasic nucleotide
  misc_feature 1..22: note = source = /note="Description of Artificial Sequence: Synthetic oligonucleotide"
  source 1..22: mol_type = other RNA
ncttcatgcgaatctacagttt

SEQ ID NO: 1908 - RNA, 21 nt, synthetic construct
  misc_feature 1..21: note = source = /note="Description of Artificial Sequence: Synthetic oligonucleotide"
  source 1..21: mol_type = other RNA
actgtagattcgcatgaagtt

SEQ ID NO: 1909 - RNA, 21 nt, synthetic construct
  modified_base 21: mod_base = OTHER; note = Inverted abasic nucleotide
  misc_feature 1..21: note = source = /note="Description of Artificial Sequence: Synthetic oligonucleotide"
  source 1..21: mol_type = other RNA
ctgcttcatgcctttctacan

SEQ ID NO: 1910 - RNA, 23 nt, synthetic construct
  misc_feature 1..23: note = source = /note="Description of Artificial Sequence: Synthetic oligonucleotide"
  source 1..23: mol_type = other RNA
ttgtagaaaggcatgaagcagtt

SEQ ID NO: 1911 - RNA, 22 nt, synthetic construct
  modified_base 1: mod_base = OTHER; note = Inverted abasic nucleotide
  misc_feature 1..22: note = source = /note="Description of Artificial Sequence: Synthetic oligonucleotide"
  source 1..22: mol_type = other RNA
nctgcttcatgcctttctacaa

SEQ ID NO: 1912 - RNA, 23 nt, synthetic construct
  misc_feature 1..23: note = source = /note="Description of Artificial Sequence: Synthetic oligonucleotide"
  source 1..23: mol_type = other RNA
ttgtagaaaggcatgaagcagtt

SEQ ID NO: 1913 - DNA, 21 bp, synthetic construct
  misc_feature 1..21: note = source = /note="Description of Artificial Sequence: Synthetic oligonucleotide"
  misc_feature 1..21: note = source = /note="Description of Combined DNA/RNA Molecule: Synthetic oligonucleotide"
  source 1..21: mol_type = other DNA
ctgcttcatgcctttctacaa

SEQ ID NO: 1914 - RNA, 23 nt, synthetic construct
  misc_feature 1..23: note = source = /note="Description of Artificial Sequence: Synthetic oligonucleotide"
  source 1..23: mol_type = other RNA
ttgtagaaaggcatgaagcagtt

SEQ ID NO: 1915 - RNA, 21 nt, synthetic construct
  modified_base 21: mod_base = OTHER; note = Inverted abasic nucleotide
  misc_feature 1..21: note = source = /note="Description of Artificial Sequence: Synthetic oligonucleotide"
  source 1..21: mol_type = other RNA
ctgcttcatgggattctacan

SEQ ID NO: 1916 - RNA, 23 nt, synthetic construct
  misc_feature 1..23: note = source = /note="Description of Artificial Sequence: Synthetic oligonucleotide"
  source 1..23: mol_type = other RNA
atgtagaatcccatgaagcagtt

SEQ ID NO: 1917 - RNA, 22 nt, synthetic construct
  modified_base 1: mod_base = OTHER; note = Inverted abasic nucleotide
  misc_feature 1..22: note = source = /note="Description of Artificial Sequence: Synthetic oligonucleotide"
  source 1..22: mol_type = other RNA
nctgcttcatgggattctacat

SEQ ID NO: 1918 - RNA, 23 nt, synthetic construct
  misc_feature 1..23: note = source = /note="Description of Artificial Sequence: Synthetic oligonucleotide"
  source 1..23: mol_type = other RNA
atgtagaatcccatgaagcagtt

SEQ ID NO: 1919 - RNA, 22 nt, synthetic construct
  modified_base 1: mod_base = OTHER; note = Inverted abasic nucleotide
  misc_feature 1..22: note = source = /note="Description of Artificial Sequence: Synthetic oligonucleotide"
  source 1..22: mol_type = other RNA
ncttcatgcctttctacagttt

SEQ ID NO: 1920 - RNA, 21 nt, synthetic construct
  misc_feature 1..21: note = source = /note="Description of Artificial Sequence: Synthetic oligonucleotide"
  source 1..21: mol_type = other RNA
actgtagaaaggcatgaagtt

SEQ ID NO: 1921 - RNA, 22 nt, synthetic construct
  modified_base 1: mod_base = OTHER; note = Inverted abasic nucleotide
  misc_feature 1..22: note = source = /note="Description of Artificial Sequence: Synthetic oligonucleotide"
  source 1..22: mol_type = other RNA
ncttcatgcctttctacagttt

SEQ ID NO: 1922 - RNA, 21 nt, synthetic construct
  misc_feature 1..21: note = source = /note="Description of Artificial Sequence: Synthetic oligonucleotide"
  source 1..21: mol_type = other RNA
actgtagaaaggcatgaagtt

SEQ ID NO: 1923 - RNA, 22 nt, synthetic construct
  modified_base 1: mod_base = OTHER; note = Inverted abasic nucleotide
  misc_feature 1..22: note = source = /note="Description of Artificial Sequence: Synthetic oligonucleotide"
  source 1..22: mol_type = other RNA
ngcttcatgcctttctacattt

SEQ ID NO: 1924 - RNA, 21 nt, synthetic construct
  misc_feature 1..21: note = source = /note="Description of Artificial Sequence: Synthetic oligonucleotide"
  source 1..21: mol_type = other RNA
atgtagaaaggcatgaagctt

SEQ ID NO: 1925 - RNA, 22 nt, synthetic construct
  modified_base 1: mod_base = OTHER; note = Inverted abasic nucleotide
  modified_base 22: mod_base = OTHER; note = Inverted abasic nucleotide
  misc_feature 1..22: note = source = /note="Description of Artificial Sequence: Synthetic oligonucleotide"
  source 1..22: mol_type = other RNA
ntgcttcatgcctttctacagn

SEQ ID NO: 1926 - RNA, 23 nt, synthetic construct
  misc_feature 1..23: note = source = /note="Description of Artificial Sequence: Synthetic oligonucleotide"
  source 1..23: mol_type = other RNA
actgtagaaaggcatgaagcatt

SEQ ID NO: 1927 - RNA, 22 nt, synthetic construct
  modified_base 1: mod_base = OTHER; note = Inverted abasic nucleotide
  misc_feature 1..22: note = source = /note="Description of Artificial Sequence: Synthetic oligonucleotide"
  source 1..22: mol_type = other RNA
ncttcatgcctttctacagttt

SEQ ID NO: 1928 - RNA, 21 nt, synthetic construct
  misc_feature 1..21: note = source = /note="Description of Artificial Sequence: Synthetic oligonucleotide"
  source 1..21: mol_type = other RNA
actgtagaaaggcatgaagtt

SEQ ID NO: 1929 - RNA, 21 nt, synthetic construct
  modified_base 21: mod_base = OTHER; note = Inverted abasic nucleotide
  misc_feature 1..21: note = source = /note="Description of Artificial Sequence: Synthetic oligonucleotide"
  source 1..21: mol_type = other RNA
tgcttcatgcctttctacagn

SEQ ID NO: 1930 - RNA, 23 nt, synthetic construct
  misc_feature 1..23: note = source = /note="Description of Artificial Sequence: Synthetic oligonucleotide"
  source 1..23: mol_type = other RNA
actgtagaaaggcatgaagcatt

SEQ ID NO: 1931 - RNA, 21 nt, synthetic construct
  modified_base 21: mod_base = OTHER; note = Inverted abasic nucleotide
  misc_feature 1..21: note = source = /note="Description of Artificial Sequence: Synthetic oligonucleotide"
  source 1..21: mol_type = other RNA
tgcttcatgcctttctacagn

SEQ ID NO: 1932 - RNA, 23 nt, synthetic construct
  misc_feature 1..23: note = source = /note="Description of Artificial Sequence: Synthetic oligonucleotide"
  source 1..23: mol_type = other RNA
actgtagaaaggcatgaagcatt

SEQ ID NO: 1933 - RNA, 21 nt, synthetic construct
  modified_base 21: mod_base = OTHER; note = Inverted abasic nucleotide
  misc_feature 1..21: note = source = /note="Description of Artificial Sequence: Synthetic oligonucleotide"
  source 1..21: mol_type = other RNA
tgcttcatgcctttctacagn

SEQ ID NO: 1934 - RNA, 23 nt, synthetic construct
  misc_feature 1..23: note = source = /note="Description of Artificial Sequence: Synthetic oligonucleotide"
  source 1..23: mol_type = other RNA
actgtagaaaggcatgaagcatt

SEQ ID NO: 1935 - RNA, 22 nt, synthetic construct
  modified_base 1: mod_base = OTHER; note = Inverted abasic nucleotide
  misc_feature 1..22: note = source = /note="Description of Artificial Sequence: Synthetic oligonucleotide"
  source 1..22: mol_type = other RNA
ncttcatgcctttctacagttt

SEQ ID NO: 1936 - RNA, 21 nt, synthetic construct
  misc_feature 1..21: note = source = /note="Description of Artificial Sequence: Synthetic oligonucleotide"
  source 1..21: mol_type = other RNA
actgtagaaaggcatgaagtt

SEQ ID NO: 1937 - RNA, 21 nt, synthetic construct
  modified_base 21: mod_base = OTHER; note = Inverted abasic nucleotide
  misc_feature 1..21: note = source = /note="Description of Artificial Sequence: Synthetic oligonucleotide"
  source 1..21: mol_type = other RNA
tgcttcatgcctttctacagn

SEQ ID NO: 1938 - RNA, 23 nt, synthetic construct
  misc_feature 1..23: note = source = /note="Description of Artificial Sequence: Synthetic oligonucleotide"
  source 1..23: mol_type = other RNA
actgtagaaaggcatgaagcatt

SEQ ID NO: 1939 - RNA, 21 nt, synthetic construct
  modified_base 21: mod_base = OTHER; note = Inverted abasic nucleotide
  misc_feature 1..21: note = source = /note="Description of Artificial Sequence: Synthetic oligonucleotide"
  source 1..21: mol_type = other RNA
atgcctttctacagtggcttn

SEQ ID NO: 1940 - RNA, 23 nt, synthetic construct
  misc_feature 1..23: note = source = /note="Description of Artificial Sequence: Synthetic oligonucleotide"
  source 1..23: mol_type = other RNA
agccactgtagaaaggcatgatt

SEQ ID NO: 1941 - RNA, 21 nt, synthetic construct
  modified_base 21: mod_base = OTHER; note = Inverted abasic nucleotide
  misc_feature 1..21: note = source = /note="Description of Artificial Sequence: Synthetic oligonucleotide"
  source 1..21: mol_type = other RNA
tcatgcctttctacagtggcn

SEQ ID NO: 1942 - RNA, 23 nt, synthetic construct
  misc_feature 1..23: note = source = /note="Description of Artificial Sequence: Synthetic oligonucleotide"
  source 1..23: mol_type = other RNA
agccactgtagaaaggcatgatt

SEQ ID NO: 1943 - RNA, 22 nt, synthetic construct
  modified_base 1: mod_base = OTHER; note = Inverted abasic nucleotide
  misc_feature 1..22: note = source = /note="Description of Artificial Sequence: Synthetic oligonucleotide"
  source 1..22: mol_type = other RNA
natgcctttctacagtggcttt

SEQ ID NO: 1944 - RNA, 21 nt, synthetic construct
  misc_feature 1..21: note = source = /note="Description of Artificial Sequence: Synthetic oligonucleotide"
  source 1..21: mol_type = other RNA
agccactgtagaaaggcattt

SEQ ID NO: 1945 - RNA, 22 nt, synthetic construct
  modified_base 1: mod_base = OTHER; note = Inverted abasic nucleotide
  misc_feature 1..22: note = source = /note="Description of Artificial Sequence: Synthetic oligonucleotide"
  source 1..22: mol_type = other RNA
natgcctttctacagtggcttt

SEQ ID NO: 1946 - RNA, 21 nt, synthetic construct
  misc_feature 1..21: note = source = /note="Description of Artificial Sequence: Synthetic oligonucleotide"
  source 1..21: mol_type = other RNA
agccactgtagaaaggcattt

SEQ ID NO: 1947 - RNA, 22 nt, synthetic construct
  modified_base 1: mod_base = OTHER; note = Inverted abasic nucleotide
  misc_feature 1..22: note = source = /note="Description of Artificial Sequence: Synthetic oligonucleotide"
  source 1..22: mol_type = other RNA
ntcatgcctttctacagtggct

SEQ ID NO: 1948 - RNA, 23 nt, synthetic construct
  misc_feature 1..23: note = source = /note="Description of Artificial Sequence: Synthetic oligonucleotide"
  source 1..23: mol_type = other RNA
agccactgtagaaaggcatgatt

SEQ ID NO: 1949 - RNA, 21 nt, synthetic construct
  modified_base 21: mod_base = OTHER; note = Inverted abasic nucleotide
  misc_feature 1..21: note = source = /note="Description of Artificial Sequence: Synthetic oligonucleotide"
  source 1..21: mol_type = other RNA
tcatgcctttctacagtggcn

SEQ ID NO: 1950 - RNA, 23 nt, synthetic construct
  misc_feature 1..23: note = source = /note="Description of Artificial Sequence: Synthetic oligonucleotide"
  source 1..23: mol_type = other RNA
agccactgtagaaaggcatgatt

SEQ ID NO: 1951 - RNA, 22 nt, synthetic construct
  modified_base 1: mod_base = OTHER; note = Inverted abasic nucleotide
  misc_feature 1..22: note = source = /note="Description of Artificial Sequence: Synthetic oligonucleotide"
  source 1..22: mol_type = other RNA
natgcctttctacagtggcttt

SEQ ID NO: 1952 - RNA, 21 nt, synthetic construct
  misc_feature 1..21: note = source = /note="Description of Artificial Sequence: Synthetic oligonucleotide"
  source 1..21: mol_type = other RNA
agccactgtagaaaggcattt

SEQ ID NO: 1953 - RNA, 21 nt, synthetic construct
  modified_base 21: mod_base = OTHER; note = Inverted abasic nucleotide
  misc_feature 1..21: note = source = /note="Description of Artificial Sequence: Synthetic oligonucleotide"
  source 1..21: mol_type = other RNA
tcatgcctttctacagtggcn

SEQ ID NO: 1954 - RNA, 23 nt, synthetic construct
  misc_feature 1..23: note = source = /note="Description of Artificial Sequence: Synthetic oligonucleotide"
  source 1..23: mol_type = other RNA
agccactgtagaaaggcatgatt

SEQ ID NO: 1955 - RNA, 21 nt, synthetic construct
  modified_base 21: mod_base = OTHER; note = Inverted abasic nucleotide
  misc_feature 1..21: note = source = /note="Description of Artificial Sequence: Synthetic oligonucleotide"
  source 1..21: mol_type = other RNA
tcatgcctttctacagtggcn

SEQ ID NO: 1956 - RNA, 23 nt, synthetic construct
  misc_feature 1..23: note = source = /note="Description of Artificial Sequence: Synthetic oligonucleotide"
  source 1..23: mol_type = other RNA
agccactgtagaaaggcatgatt

SEQ ID NO: 1957 - RNA, 22 nt, synthetic construct
  modified_base 1: mod_base = OTHER; note = Inverted abasic nucleotide
  modified_base 22: mod_base = OTHER; note = Inverted abasic nucleotide
  misc_feature 1..22: note = source = /note="Description of Artificial Sequence: Synthetic oligonucleotide"
  source 1..22: mol_type = other RNA
ntcatgcctttctacagtggcn

SEQ ID NO: 1958 - RNA, 23 nt, synthetic construct
  misc_feature 1..23: note = source = /note="Description of Artificial Sequence: Synthetic oligonucleotide"
  source 1..23: mol_type = other RNA
agccactgtagaaaggcatgatt

SEQ ID NO: 1959 - RNA, 22 nt, synthetic construct
  modified_base 1: mod_base = OTHER; note = Inverted abasic nucleotide
  misc_feature 1..22: note = source = /note="Description of Artificial Sequence: Synthetic oligonucleotide"
  source 1..22: mol_type = other RNA
natgcctttctacagtggcatt

SEQ ID NO: 1960 - RNA, 21 nt, synthetic construct
  misc_feature 1..21: note = source = /note="Description of Artificial Sequence: Synthetic oligonucleotide"
  source 1..21: mol_type = other RNA
tgccactgtagaaaggcattt

SEQ ID NO: 1961 - RNA, 21 nt, synthetic construct
  modified_base 21: mod_base = OTHER; note = Inverted abasic nucleotide
  misc_feature 1..21: note = source = /note="Description of Artificial Sequence: Synthetic oligonucleotide"
  source 1..21: mol_type = other RNA
tcatgcctttctacagtggcn

SEQ ID NO: 1962 - RNA, 23 nt, synthetic construct
  misc_feature 1..23: note = source = /note="Description of Artificial Sequence: Synthetic oligonucleotide"
  source 1..23: mol_type = other RNA
tgccactgtagaaaggcatgatt

SEQ ID NO: 1963 - RNA, 22 nt, synthetic construct
  modified_base 1: mod_base = OTHER; note = Inverted abasic nucleotide
  misc_feature 1..22: note = source = /note="Description of Artificial Sequence: Synthetic oligonucleotide"
  source 1..22: mol_type = other RNA
ntcatgcctttctacagtggca

SEQ ID NO: 1964 - RNA, 23 nt, synthetic construct
  misc_feature 1..23: note = source = /note="Description of Artificial Sequence: Synthetic oligonucleotide"
  source 1..23: mol_type = other RNA
tgccactgtagaaaggcatgatt

SEQ ID NO: 1965 - DNA, 21 bp, synthetic construct
  misc_feature 1..21: note = source = /note="Description of Artificial Sequence: Synthetic oligonucleotide"
  misc_feature 1..21: note = source = /note="Description of Combined DNA/RNA Molecule: Synthetic oligonucleotide"
  source 1..21: mol_type = other DNA
tcatgcctttctacagtggca

SEQ ID NO: 1966 - RNA, 23 nt, synthetic construct
  misc_feature 1..23: note = source = /note="Description of Artificial Sequence: Synthetic oligonucleotide"
  source 1..23: mol_type = other RNA
tgccactgtagaaaggcatgatt

SEQ ID NO: 1967 - RNA, 21 nt, synthetic construct
  modified_base 21: mod_base = OTHER; note = Inverted abasic nucleotide
  misc_feature 1..21: note = source = /note="Description of Artificial Sequence: Synthetic oligonucleotide"
  source 1..21: mol_type = other RNA
ctgcttcatgcctttctacan

SEQ ID NO: 1968 - RNA, 23 nt, synthetic construct
  misc_feature 1..23: note = source = /note="Description of Artificial Sequence: Synthetic oligonucleotide"
  source 1..23: mol_type = other RNA
atgtagaaaggcatgaagcagtt

SEQ ID NO: 1969 - RNA, 21 nt, synthetic construct
  modified_base 21: mod_base = OTHER; note = Inverted abasic nucleotide
  misc_feature 1..21: note = source = /note="Description of Artificial Sequence: Synthetic oligonucleotide"
  source 1..21: mol_type = other RNA
ctgcttcatgcctttctacan

SEQ ID NO: 1970 - RNA, 23 nt, synthetic construct
  misc_feature 1..23: note = source = /note="Description of Artificial Sequence: Synthetic oligonucleotide"
  source 1..23: mol_type = other RNA
ttgtagaaaggcatgaagcagtt

SEQ ID NO: 1971 - DNA, 21 bp, synthetic construct
  misc_feature 1..21: note = source = /note="Description of Artificial Sequence: Synthetic oligonucleotide"
  misc_feature 1..21: note = source = /note="Description of Combined DNA/RNA Molecule: Synthetic oligonucleotide"
  source 1..21: mol_type = other DNA
ctgcttcatgcctttctacaa

SEQ ID NO: 1972 - RNA, 23 nt, synthetic construct
  misc_feature 1..23: note = source = /note="Description of Artificial Sequence: Synthetic oligonucleotide"
  source 1..23: mol_type = other RNA
ttgtagaaaggcatgaagcagtt

SEQ ID NO: 1973 - RNA, 21 nt, synthetic construct
  modified_base 21: mod_base = OTHER; note = Inverted abasic nucleotide
  misc_feature 1..21: note = source = /note="Description of Artificial Sequence: Synthetic oligonucleotide"
  source 1..21: mol_type = other RNA
tcatgcctttctacagtggcn

SEQ ID NO: 1974 - RNA, 23 nt, synthetic construct
  misc_feature 1..23: note = source = /note="Description of Artificial Sequence: Synthetic oligonucleotide"
  source 1..23: mol_type = other RNA
tgccactgtagaaaggcatgatt

SEQ ID NO: 1975 - DNA, 21 bp, synthetic construct
  misc_feature 1..21: note = source = /note="Description of Artificial Sequence: Synthetic oligonucleotide"
  misc_feature 1..21: note = source = /note="Description of Combined DNA/RNA Molecule: Synthetic oligonucleotide"
  source 1..21: mol_type = other DNA
tcatgcctttctacagtggca

SEQ ID NO: 1976 - RNA, 23 nt, synthetic construct
  misc_feature 1..23: note = source = /note="Description of Artificial Sequence: Synthetic oligonucleotide"
  source 1..23: mol_type = other RNA
tgccactgtagaaaggcatgatt

SEQ ID NO: 1977 - RNA, 22 nt, synthetic construct
  modified_base 1: mod_base = OTHER; note = Inverted abasic nucleotide
  misc_feature 1..22: note = source = /note="Description of Artificial Sequence: Synthetic oligonucleotide"
  source 1..22: mol_type = other RNA
ncttcatgcctttctacagttt

SEQ ID NO: 1978 - RNA, 21 nt, synthetic construct
  misc_feature 1..21: note = source = /note="Description of Artificial Sequence: Synthetic oligonucleotide"
  source 1..21: mol_type = other RNA
actgtagaaaggcatgaagtt

SEQ ID NO: 1979 - RNA, 21 nt, synthetic construct
  modified_base 21: mod_base = OTHER; note = Inverted abasic nucleotide
  misc_feature 1..21: note = source = /note="Description of Artificial Sequence: Synthetic oligonucleotide"
  source 1..21: mol_type = other RNA
ctgcttcatgcctttctacan

SEQ ID NO: 1980 - RNA, 23 nt, synthetic construct
  modified_base 6: mod_base = OTHER; note = Abasic nucleotide
  misc_feature 1..23: note = source = /note="Description of Artificial Sequence: Synthetic oligonucleotide"
  source 1..23: mol_type = other RNA
atgtanaaaggcatgaagcagtt

SEQ ID NO: 1981 - RNA, 21 nt, synthetic construct
  modified_base 21: mod_base = OTHER; note = Inverted abasic nucleotide
  misc_feature 1..21: note = source = /note="Description of Artificial Sequence: Synthetic oligonucleotide"
  source 1..21: mol_type = other RNA
ctgcttcatgcctttctacan

SEQ ID NO: 1982 - RNA, 23 nt, synthetic construct
  modified_base 6: mod_base = OTHER; note = Abasic nucleotide
  misc_feature 1..23: note = source = /note="Description of Artificial Sequence: Synthetic oligonucleotide"
  source 1..23: mol_type = other RNA
atgtanaaaggcatgaagcagtt

SEQ ID NO: 1983 - RNA, 21 nt, synthetic construct
  modified_base 21: mod_base = OTHER; note = Inverted abasic nucleotide
  misc_feature 1..21: note = source = /note="Description of Artificial Sequence: Synthetic oligonucleotide"
  source 1..21: mol_type = other RNA
tgcttcatgcctttctacagn

SEQ ID NO: 1984 - RNA, 23 nt, synthetic construct
  modified_base 6: mod_base = OTHER; note = Abasic nucleotide
  misc_feature 1..23: note = source = /note="Description of Artificial Sequence: Synthetic oligonucleotide"
  source 1..23: mol_type = other RNA
actgtngaaaggcatgaagcatt

SEQ ID NO: 1985 - RNA, 21 nt, synthetic construct
  modified_base 21: mod_base = OTHER; note = Inverted abasic nucleotide
  misc_feature 1..21: note = source = /note="Description of Artificial Sequence: Synthetic oligonucleotide"
  source 1..21: mol_type = other RNA
tgcttcatgcctttctacagn

SEQ ID NO: 1986 - RNA, 23 nt, synthetic construct
  modified_base 6: mod_base = OTHER; note = Abasic nucleotide
  misc_feature 1..23: note = source = /note="Description of Artificial Sequence: Synthetic oligonucleotide"
  source 1..23: mol_type = other RNA
actgtngaaaggcatgaagcatt

SEQ ID NO: 1987 - RNA, 21 nt, synthetic construct
  modified_base 21: mod_base = OTHER; note = Inverted abasic nucleotide
  misc_feature 1..21: note = source = /note="Description of Artificial Sequence: Synthetic oligonucleotide"
  source 1..21: mol_type = other RNA
tcatgcctttctacagtggcn

SEQ ID NO: 1988 - RNA, 23 nt, synthetic construct
  modified_base 6: mod_base = OTHER; note = Abasic nucleotide
  misc_feature 1..23: note = source = /note="Description of Artificial Sequence: Synthetic oligonucleotide"
  source 1..23: mol_type = other RNA
agccantgtagaaaggcatgatt

SEQ ID NO: 1989 - RNA, 21 nt, synthetic construct
  modified_base 21: mod_base = OTHER; note = Inverted abasic nucleotide
  misc_feature 1..21: note = source = /note="Description of Artificial Sequence: Synthetic oligonucleotide"
  source 1..21: mol_type = other RNA
tcatgcctttctacagtggcn

SEQ ID NO: 1990 - RNA, 23 nt, synthetic construct
  modified_base 6: mod_base = OTHER; note = Abasic nucleotide
  misc_feature 1..23: note = source = /note="Description of Artificial Sequence: Synthetic oligonucleotide"
  source 1..23: mol_type = other RNA
agccantgtagaaaggcatgatt

SEQ ID NO: 1991 - RNA, 21 nt, synthetic construct
  modified_base 21: mod_base = OTHER; note = Inverted abasic nucleotide
  misc_feature 1..21: note = source = /note="Description of Artificial Sequence: Synthetic oligonucleotide"
  source 1..21: mol_type = other RNA
ctgcttcatgcctttctacan

SEQ ID NO: 1992 - RNA, 23 nt, synthetic construct
  misc_feature 1..23: note = source = /note="Description of Artificial Sequence: Synthetic oligonucleotide"
  source 1..23: mol_type = other RNA
atgtagaaaggcatgaagcagtt

SEQ ID NO: 1993 - RNA, 21 nt, synthetic construct
  modified_base 21: mod_base = OTHER; note = Inverted abasic nucleotide
  misc_feature 1..21: note = source = /note="Description of Artificial Sequence: Synthetic oligonucleotide"
  source 1..21: mol_type = other RNA
ctgcttcatgcctttctacan

SEQ ID NO: 1994 - RNA, 23 nt, synthetic construct
  misc_feature 1..23: note = source = /note="Description of Artificial Sequence: Synthetic oligonucleotide"
  source 1..23: mol_type = other RNA
atgtagaaaggcatgaagcagtt

SEQ ID NO: 1995 - RNA, 21 nt, synthetic construct
  modified_base 21: mod_base = OTHER; note = Inverted abasic nucleotide
  misc_feature 1..21: note = source = /note="Description of Artificial Sequence: Synthetic oligonucleotide"
  source 1..21: mol_type = other RNA
ctgcttcatgcctttctacan

SEQ ID NO: 1996 - RNA, 23 nt, synthetic construct
  misc_feature 1..23: note = source = /note="Description of Artificial Sequence: Synthetic oligonucleotide"
  source 1..23: mol_type = other RNA
atgtagaaaggcatgaagcagtt

SEQ ID NO: 1997 - RNA, 21 nt, synthetic construct
  modified_base 21: mod_base = OTHER; note = Inverted abasic nucleotide
  misc_feature 1..21: note = source = /note="Description of Artificial Sequence: Synthetic oligonucleotide"
  source 1..21: mol_type = other RNA
ctgcttcatgcctttctacan

SEQ ID NO: 1998 - RNA, 23 nt, synthetic construct
  misc_feature 1..23: note = source = /note="Description of Artificial Sequence: Synthetic oligonucleotide"
  source 1..23: mol_type = other RNA
atgtagaaaggcatgaagcagtt

SEQ ID NO: 1999 - RNA, 21 nt, synthetic construct
  modified_base 21: mod_base = OTHER; note = Inverted abasic nucleotide
  misc_feature 1..21: note = source = /note="Description of Artificial Sequence: Synthetic oligonucleotide"
  source 1..21: mol_type = other RNA
ctgcttcatgcctttctacan

SEQ ID NO: 2000 - RNA, 23 nt, synthetic construct
  misc_feature 1..23: note = source = /note="Description of Artificial Sequence: Synthetic oligonucleotide"
  source 1..23: mol_type = other RNA
atgtagaaaggcatgaagcagtt

SEQ ID NO: 2001 - RNA, 21 nt, synthetic construct
  modified_base 21: mod_base = OTHER; note = Inverted abasic nucleotide
  misc_feature 1..21: note = source = /note="Description of Artificial Sequence: Synthetic oligonucleotide"
  source 1..21: mol_type = other RNA
ctgcttcatgcctttctacan

SEQ ID NO: 2002 - RNA, 23 nt, synthetic construct
  misc_feature 1..23: note = source = /note="Description of Artificial Sequence: Synthetic oligonucleotide"
  source 1..23: mol_type = other RNA
atgtagaaaggcatgaagcagtt

SEQ ID NO: 2003 - RNA, 21 nt, synthetic construct
  modified_base 21: mod_base = OTHER; note = Inverted abasic nucleotide
  misc_feature 1..21: note = source = /note="Description of Artificial Sequence: Synthetic oligonucleotide"
  source 1..21: mol_type = other RNA
ctgcttcatgcctttctacan

SEQ ID NO: 2004 - RNA, 23 nt, synthetic construct
  misc_feature 1..23: note = source = /note="Description of Artificial Sequence: Synthetic oligonucleotide"
  source 1..23: mol_type = other RNA
atgtagaaaggcatgaagcagtt

SEQ ID NO: 2005 - RNA, 22 nt, synthetic construct
  modified_base 1: mod_base = OTHER; note = Inverted abasic nucleotide
  misc_feature 1..22: note = source = /note="Description of Artificial Sequence: Synthetic oligonucleotide"
  source 1..22: mol_type = other RNA
nctgcttcatgcctttctacat

SEQ ID NO: 2006 - RNA, 23 nt, synthetic construct
  misc_feature 1..23: note = source = /note="Description of Artificial Sequence: Synthetic oligonucleotide"
  source 1..23: mol_type = other RNA
atgtagaaaggcatgaagcagtt

SEQ ID NO: 2007 - RNA, 22 nt, synthetic construct
  modified_base 1: mod_base = OTHER; note = Inverted abasic nucleotide
  modified_base 22: mod_base = OTHER; note = Inverted abasic nucleotide
  misc_feature 1..22: note = source = /note="Description of Artificial Sequence: Synthetic oligonucleotide"
  source 1..22: mol_type = other RNA
nctgcttcatgcctttctacan

SEQ ID NO: 2008 - RNA, 23 nt, synthetic construct
  misc_feature 1..23: note = source = /note="Description of Artificial Sequence: Synthetic oligonucleotide"
  source 1..23: mol_type = other RNA
atgtagaaaggcatgaagcagtt

SEQ ID NO: 2009 - RNA, 21 nt, synthetic construct
  modified_base 21: mod_base = OTHER; note = Inverted abasic nucleotide
  misc_feature 1..21: note = source = /note="Description of Artificial Sequence: Synthetic oligonucleotide"
  source 1..21: mol_type = other RNA
ctgcttcatgcctttctacan

SEQ ID NO: 2010 - RNA, 23 nt, synthetic construct
  misc_feature 1..23: note = source = /note="Description of Artificial Sequence: Synthetic oligonucleotide"
  source 1..23: mol_type = other RNA
atgtagaaaggcatgaagcagtt

SEQ ID NO: 2011 - RNA, 21 nt, synthetic construct
  modified_base 21: mod_base = OTHER; note = Inverted abasic nucleotide
  misc_feature 1..21: note = source = /note="Description of Artificial Sequence: Synthetic oligonucleotide"
  source 1..21: mol_type = other RNA
ctgcttcatgcctttctacan

SEQ ID NO: 2012 - RNA, 23 nt, synthetic construct
  misc_feature 1..23: note = source = /note="Description of Artificial Sequence: Synthetic oligonucleotide"
  source 1..23: mol_type = other RNA
atgtagaaaggcatgaagcagtt

SEQ ID NO: 2013 - RNA, 22 nt, synthetic construct
  modified_base 1: mod_base = OTHER; note = Inverted abasic nucleotide
  misc_feature 1..22: note = source = /note="Description of Artificial Sequence: Synthetic oligonucleotide"
  source 1..22: mol_type = other RNA
nctgcttcatgcctttctacat

SEQ ID NO: 2014 - RNA, 23 nt, synthetic construct
  misc_feature 1..23: note = source = /note="Description of Artificial Sequence: Synthetic oligonucleotide"
  source 1..23: mol_type = other RNA
atgtagaaaggcatgaagcagtt

SEQ ID NO: 2015 - RNA, 21 nt, synthetic construct
  modified_base 21: mod_base = OTHER; note = Inverted abasic nucleotide
  misc_feature 1..21: note = source = /note="Description of Artificial Sequence: Synthetic oligonucleotide"
  source 1..21: mol_type = other RNA
ctgcttcatgcctttctacan

SEQ ID NO: 2016 - RNA, 23 nt, synthetic construct
  misc_feature 1..23: note = source = /note="Description of Artificial Sequence: Synthetic oligonucleotide"
  source 1..23: mol_type = other RNA
atgtagaaaggcatgaagcagtt

SEQ ID NO: 2017 - RNA, 21 nt, synthetic construct
  modified_base 21: mod_base = OTHER; note = Inverted abasic nucleotide
  misc_feature 1..21: note = source = /note="Description of Artificial Sequence: Synthetic oligonucleotide"
  source 1..21: mol_type = other RNA
ctgcttcatgcctttctacan

SEQ ID NO: 2018 - RNA, 23 nt, synthetic construct
  misc_feature 1..23: note = source = /note="Description of Artificial Sequence: Synthetic oligonucleotide"
  source 1..23: mol_type = other RNA
atgtagaaaggcatgaagcagtt

SEQ ID NO: 2019 - RNA, 22 nt, synthetic construct
  modified_base 1: mod_base = OTHER; note = Inverted abasic nucleotide
  misc_feature 1..22: note = source = /note="Description of Artificial Sequence: Synthetic oligonucleotide"
  source 1..22: mol_type = other RNA
nctgcttcatgcctttctacat

SEQ ID NO: 2020 - RNA, 23 nt, synthetic construct
  misc_feature 1..23: note = source = /note="Description of Artificial Sequence: Synthetic oligonucleotide"
  source 1..23: mol_type = other RNA
atgtagaaaggcatgaagcagtt

SEQ ID NO: 2021 - RNA, 22 nt, synthetic construct
  modified_base 1: mod_base = OTHER; note = Inverted abasic nucleotide
  modified_base 22: mod_base = OTHER; note = Inverted abasic nucleotide
  misc_feature 1..22: note = source = /note="Description of Artificial Sequence: Synthetic oligonucleotide"
  source 1..22: mol_type = other RNA
nctgcttcatgcctttctacan

SEQ ID NO: 2022 - RNA, 23 nt, synthetic construct
  misc_feature 1..23: note = source = /note="Description of Artificial Sequence: Synthetic oligonucleotide"
  source 1..23: mol_type = other RNA
atgtagaaaggcatgaagcagtt

SEQ ID NO: 2023 - RNA, 21 nt, synthetic construct
  modified_base 21: mod_base = OTHER; note = Inverted abasic nucleotide
  misc_feature 1..21: note = source = /note="Description of Artificial Sequence: Synthetic oligonucleotide"
  source 1..21: mol_type = other RNA
ctgcttcatgcctttctacan

SEQ ID NO: 2024 - RNA, 23 nt, synthetic construct
  modified_base 2: mod_base = OTHER; note = Abasic nucleotide
  misc_feature 1..23: note = source = /note="Description of Artificial Sequence: Synthetic oligonucleotide"
  source 1..23: mol_type = other RNA
angtagaaaggcatgaagcagtt

SEQ ID NO: 2025 - RNA, 21 nt, synthetic construct
  modified_base 21: mod_base = OTHER; note = Inverted abasic nucleotide
  misc_feature 1..21: note = source = /note="Description of Artificial Sequence: Synthetic oligonucleotide"
  source 1..21: mol_type = other RNA
ctgcttcatgcctttctacan

SEQ ID NO: 2026 - RNA, 23 nt, synthetic construct
  modified_base 3: mod_base = OTHER; note = Abasic nucleotide
  misc_feature 1..23: note = source = /note="Description of Artificial Sequence: Synthetic oligonucleotide"
  source 1..23: mol_type = other RNA
atntagaaaggcatgaagcagtt

SEQ ID NO: 2027 - RNA, 21 nt, synthetic construct
  modified_base 21: mod_base = OTHER; note = Inverted abasic nucleotide
  misc_feature 1..21: note = source = /note="Description of Artificial Sequence: Synthetic oligonucleotide"
  source 1..21: mol_type = other RNA
ctgcttcatgcctttctacan

SEQ ID NO: 2028 - RNA, 23 nt, synthetic construct
  modified_base 4: mod_base = OTHER; note = Abasic nucleotide
  misc_feature 1..23: note = source = /note="Description of Artificial Sequence: Synthetic oligonucleotide"
  source 1..23: mol_type = other RNA
atgnagaaaggcatgaagcagtt

SEQ ID NO: 2029 - RNA, 21 nt, synthetic construct
  modified_base 21: mod_base = OTHER; note = Inverted abasic nucleotide
  misc_feature 1..21: note = source = /note="Description of Artificial Sequence: Synthetic oligonucleotide"
  source 1..21: mol_type = other RNA
ctgcttcatgcctttctacan

SEQ ID NO: 2030 - RNA, 23 nt, synthetic construct
  modified_base 5: mod_base = OTHER; note = Abasic nucleotide
  misc_feature 1..23: note = source = /note="Description of Artificial Sequence: Synthetic oligonucleotide"
  source 1..23: mol_type = other RNA
atgtngaaaggcatgaagcagtt

SEQ ID NO: 2031 - RNA, 21 nt, synthetic construct
  modified_base 21: mod_base = OTHER; note = Inverted abasic nucleotide
  misc_feature 1..21: note = source = /note="Description of Artificial Sequence: Synthetic oligonucleotide"
  source 1..21: mol_type = other RNA
ctgcttcatgcctttctacan

SEQ ID NO: 2032 - RNA, 23 nt, synthetic construct
  modified_base 7: mod_base = OTHER; note = Abasic nucleotide
  misc_feature 1..23: note = source = /note="Description of Artificial Sequence: Synthetic oligonucleotide"
  source 1..23: mol_type = other RNA
atgtagnaaggcatgaagcagtt

SEQ ID NO: 2033 - RNA, 21 nt, synthetic construct
  modified_base 21: mod_base = OTHER; note = Inverted abasic nucleotide
  misc_feature 1..21: note = source = /note="Description of Artificial Sequence: Synthetic oligonucleotide"
  source 1..21: mol_type = other RNA
ctgcttcatgcctttctacan

SEQ ID NO: 2034 - RNA, 23 nt, synthetic construct
  modified_base 8: mod_base = OTHER; note = Abasic nucleotide
  misc_feature 1..23: note = source = /note="Description of Artificial Sequence: Synthetic oligonucleotide"
  source 1..23: mol_type = other RNA
atgtaganaggcatgaagcagtt

SEQ ID NO: 2035 - RNA, 21 nt, synthetic construct
  modified_base 21: mod_base = OTHER; note = Inverted abasic nucleotide
  misc_feature 1..21: note = source = /note="Description of Artificial Sequence: Synthetic oligonucleotide"
  source 1..21: mol_type = other RNA
caacgtacccttcattgatgn

SEQ ID NO: 2036 - RNA, 23 nt, synthetic construct
  misc_feature 1..23: note = source = /note="Description of Artificial Sequence: Synthetic oligonucleotide"
  source 1..23: mol_type = other RNA
acatcaatgaagggtacgttgtt

SEQ ID NO: 2037 - RNA, 21 nt, synthetic construct
  modified_base 21: mod_base = OTHER; note = Inverted abasic nucleotide
  misc_feature 1..21: note = source = /note="Description of Artificial Sequence: Synthetic oligonucleotide"
  source 1..21: mol_type = other RNA
caacgtacccttcattgatgn

SEQ ID NO: 2038 - RNA, 23 nt, synthetic construct
  misc_feature 1..23: note = source = /note="Description of Artificial Sequence: Synthetic oligonucleotide"
  source 1..23: mol_type = other RNA
acatcaatgaagggtacgttgtt

SEQ ID NO: 2039 - RNA, 21 nt, synthetic construct
  modified_base 21: mod_base = OTHER; note = Inverted abasic nucleotide
  misc_feature 1..21: note = source = /note="Description of Artificial Sequence: Synthetic oligonucleotide"
  source 1..21: mol_type = other RNA
acatggcttccagatatgccn

SEQ ID NO: 2040 - RNA, 23 nt, synthetic construct
  misc_feature 1..23: note = source = /note="Description of Artificial Sequence: Synthetic oligonucleotide"
  source 1..23: mol_type = other RNA
aggcatatctggaagccatgttt

SEQ ID NO: 2041 - RNA, 21 nt, synthetic construct
  modified_base 21: mod_base = OTHER; note = Inverted abasic nucleotide
  misc_feature 1..21: note = source = /note="Description of Artificial Sequence: Synthetic oligonucleotide"
  source 1..21: mol_type = other RNA
acatggcttccagatatgccn

SEQ ID NO: 2042 - RNA, 23 nt, synthetic construct
  misc_feature 1..23: note = source = /note="Description of Artificial Sequence: Synthetic oligonucleotide"
  source 1..23: mol_type = other RNA
aggcatatctggaagccatgttt

SEQ ID NO: 2043 - RNA, 21 nt, synthetic construct
  modified_base 21: mod_base = OTHER; note = Inverted abasic nucleotide
  misc_feature 1..21: note = source = /note="Description of Artificial Sequence: Synthetic oligonucleotide"
  source 1..21: mol_type = other RNA
ctgcttcatgcctttctacan

SEQ ID NO: 2044 - RNA, 23 nt, synthetic construct
  misc_feature 1..23: note = source = /note="Description of Artificial Sequence: Synthetic oligonucleotide"
  source 1..23: mol_type = other RNA
atgtagaaaggcatgaagcagtt

SEQ ID NO: 2045 - RNA, 21 nt, synthetic construct
  modified_base 21: mod_base = OTHER; note = Inverted abasic nucleotide
  misc_feature 1..21: note = source = /note="Description of Artificial Sequence: Synthetic oligonucleotide"
  source 1..21: mol_type = other RNA
ctgcttcatgcctttctacan

SEQ ID NO: 2046 - RNA, 23 nt, synthetic construct
  misc_feature 1..23: note = source = /note="Description of Artificial Sequence: Synthetic oligonucleotide"
  source 1..23: mol_type = other RNA
atgtagaaaggcatgaagcagtt

SEQ ID NO: 2047 - RNA, 21 nt, synthetic construct
  modified_base 21: mod_base = OTHER; note = Inverted abasic nucleotide
  misc_feature 1..21: note = source = /note="Description of Artificial Sequence: Synthetic oligonucleotide"
  source 1..21: mol_type = other RNA
ctgcttcatgcctttctacan

SEQ ID NO: 2048 - RNA, 23 nt, synthetic construct
  misc_feature 1..23: note = source = /note="Description of Artificial Sequence: Synthetic oligonucleotide"
  source 1..23: mol_type = other RNA
atgtagaaaggcatgaagcagtt

SEQ ID NO: 2049 - RNA, 21 nt, synthetic construct
  modified_base 21: mod_base = OTHER; note = Inverted abasic nucleotide
  misc_feature 1..21: note = source = /note="Description of Artificial Sequence: Synthetic oligonucleotide"
  source 1..21: mol_type = other RNA
ctgcggcttcctgggcttctn

SEQ ID NO: 2050 - RNA, 23 nt, synthetic construct
  misc_feature 1..23: note = source = /note="Description of Artificial Sequence: Synthetic oligonucleotide"
  source 1..23: mol_type = other RNA
tagaagcccaggaagccgcagtt

SEQ ID NO: 2051 - RNA, 21 nt, synthetic construct
  modified_base 21: mod_base = OTHER; note = Inverted abasic nucleotide
  misc_feature 1..21: note = source = /note="Description of Artificial Sequence: Synthetic oligonucleotide"
  source 1..21: mol_type = other RNA
ctgcggcttcctgggcttctn

SEQ ID NO: 2052 - RNA, 23 nt, synthetic construct
  misc_feature 1..23: note = source = /note="Description of Artificial Sequence: Synthetic oligonucleotide"
  source 1..23: mol_type = other RNA
tagaagcccaggaagccgcagtt

SEQ ID NO: 2053 - RNA, 21 nt, synthetic construct
  modified_base 21: mod_base = OTHER; note = Inverted abasic nucleotide
  misc_feature 1..21: note = source = /note="Description of Artificial Sequence: Synthetic oligonucleotide"
  source 1..21: mol_type = other RNA
tgcttcatgcctttctacagn

SEQ ID NO: 2054 - RNA, 23 nt, synthetic construct
  misc_feature 1..23: note = source = /note="Description of Artificial Sequence: Synthetic oligonucleotide"
  source 1..23: mol_type = other RNA
actgtagaaaggcatgaagcatt

SEQ ID NO: 2055 - RNA, 22 nt, synthetic construct
  modified_base 1: mod_base = OTHER; note = Inverted abasic nucleotide
  misc_feature 1..22: note = source = /note="Description of Artificial Sequence: Synthetic oligonucleotide"
  source 1..22: mol_type = other RNA
ntgcttcatgcctttctacagt

SEQ ID NO: 2056 - RNA, 23 nt, synthetic construct
  misc_feature 1..23: note = source = /note="Description of Artificial Sequence: Synthetic oligonucleotide"
  source 1..23: mol_type = other RNA
actgtagaaaggcatgaagcatt

SEQ ID NO: 2057 - RNA, 22 nt, synthetic construct
  modified_base 1: mod_base = OTHER; note = Inverted abasic nucleotide
  modified_base 22: mod_base = OTHER; note = Inverted abasic nucleotide
  misc_feature 1..22: note = source = /note="Description of Artificial Sequence: Synthetic oligonucleotide"
  source 1..22: mol_type = other RNA
ntgcttcatgcctttctacagn

SEQ ID NO: 2058 - RNA, 23 nt, synthetic construct
  misc_feature 1..23: note = source = /note="Description of Artificial Sequence: Synthetic oligonucleotide"
  source 1..23: mol_type = other RNA
actgtagaaaggcatgaagcatt

SEQ ID NO: 2059 - RNA, 21 nt, synthetic construct
  modified_base 21: mod_base = OTHER; note = Inverted abasic nucleotide
  misc_feature 1..21: note = source = /note="Description of Artificial Sequence: Synthetic oligonucleotide"
  source 1..21: mol_type = other RNA
tgcttcatgcctttctacagn

SEQ ID NO: 2060 - RNA, 23 nt, synthetic construct
  misc_feature 1..23: note = source = /note="Description of Artificial Sequence: Synthetic oligonucleotide"
  source 1..23: mol_type = other RNA
actgtagaaaggcatgaagcatt

SEQ ID NO: 2061 - RNA, 21 nt, synthetic construct
  modified_base 21: mod_base = OTHER; note = Inverted abasic nucleotide
  misc_feature 1..21: note = source = /note="Description of Artificial Sequence: Synthetic oligonucleotide"
  source 1..21: mol_type = other RNA
tgcttcatgcctttctacagn

SEQ ID NO: 2062 - RNA, 23 nt, synthetic construct
  misc_feature 1..23: note = source = /note="Description of Artificial Sequence: Synthetic oligonucleotide"
  source 1..23: mol_type = other RNA
actgtagaaaggcatgaagcatt

SEQ ID NO: 2063 - RNA, 21 nt, synthetic construct
  modified_base 21: mod_base = OTHER; note = Inverted abasic nucleotide
  misc_feature 1..21: note = source = /note="Description of Artificial Sequence: Synthetic oligonucleotide"
  source 1..21: mol_type = other RNA
tgcttcatgcctttctacagn

SEQ ID NO: 2064 - RNA, 23 nt, synthetic construct
  misc_feature 1..23: note = source = /note="Description of Artificial Sequence: Synthetic oligonucleotide"
  source 1..23: mol_type = other RNA
actgtagaaaggcatgaagcatt

SEQ ID NO: 2065 - RNA, 21 nt, synthetic construct
  misc_feature 1..21: note = source = /note="Description of Artificial Sequence: Synthetic oligonucleotide"
  source 1..21: mol_type = other RNA
ctgcttcatgcctttctacat

SEQ ID NO: 2066 - RNA, 23 nt, synthetic construct
  misc_feature 1..23: note = source = /note="Description of Artificial Sequence: Synthetic oligonucleotide"
  source 1..23: mol_type = other RNA
atgtagaaaggcatgaagcagtt

SEQ ID NO: 2067 - RNA, 21 nt, synthetic construct
  misc_feature 1..21: note = source = /note="Description of Artificial Sequence: Synthetic oligonucleotide"
  source 1..21: mol_type = other RNA
ctgcttcatgcctttctacat

SEQ ID NO: 2068 - RNA, 23 nt, synthetic construct
  misc_feature 1..23: note = source = /note="Description of Artificial Sequence: Synthetic oligonucleotide"
  source 1..23: mol_type = other RNA
atgtagaaaggcatgaagcagtt

SEQ ID NO: 2069 - RNA, 21 nt, synthetic construct
  misc_feature 1..21: note = source = /note="Description of Artificial Sequence: Synthetic oligonucleotide"
  source 1..21: mol_type = other RNA
ctgcttcatgcctttctacat

SEQ ID NO: 2070 - RNA, 23 nt, synthetic construct
  misc_feature 1..23: note = source = /note="Description of Artificial Sequence: Synthetic oligonucleotide"
  source 1..23: mol_type = other RNA
atgtagaaaggcatgaagcagtt

SEQ ID NO: 2071 - RNA, 21 nt, synthetic construct
  modified_base 21: mod_base = OTHER; note = Inverted abasic nucleotide
  misc_feature 1..21: note = source = /note="Description of Artificial Sequence: Synthetic oligonucleotide"
  source 1..21: mol_type = other RNA
tgcttcatgcctttctacagn

SEQ ID NO: 2072 - RNA, 23 nt, synthetic construct
  misc_feature 1..23: note = source = /note="Description of Artificial Sequence: Synthetic oligonucleotide"
  source 1..23: mol_type = other RNA
tctgtagaaaggcatgaagcatt

SEQ ID NO: 2073 - DNA, 21 bp, synthetic construct
  misc_feature 1..21: note = source = /note="Description of Artificial Sequence: Synthetic oligonucleotide"
  misc_feature 1..21: note = source = /note="Description of Combined DNA/RNA Molecule: Synthetic oligonucleotide"
  source 1..21: mol_type = other DNA
tgcttcatgcctttctacaga

SEQ ID NO: 2074 - RNA, 23 nt, synthetic construct
  misc_feature 1..23: note = source = /note="Description of Artificial Sequence: Synthetic oligonucleotide"
  source 1..23: mol_type = other RNA
tctgtagaaaggcatgaagcatt

SEQ ID NO: 2075 - DNA, 21 bp, synthetic construct
  misc_feature 1..21: note = source = /note="Description of Artificial Sequence: Synthetic oligonucleotide"
  misc_feature 1..21: note = source = /note="Description of Combined DNA/RNA Molecule: Synthetic oligonucleotide"
  source 1..21: mol_type = other DNA
ctgcttcatgcctttctacat

SEQ ID NO: 2076 - RNA, 23 nt, synthetic construct
  misc_feature 1..23: note = source = /note="Description of Artificial Sequence: Synthetic oligonucleotide"
  source 1..23: mol_type = other RNA
atgtagaaaggcatgaagcagtt

SEQ ID NO: 2077 - RNA, 21 nt, synthetic construct
  modified_base 21: mod_base = OTHER; note = Inverted abasic nucleotide
  misc_feature 1..21: note = source = /note="Description of Artificial Sequence: Synthetic oligonucleotide"
  source 1..21: mol_type = other RNA
ctgcttcatgcctttctacan

SEQ ID NO: 2078 - RNA, 23 nt, synthetic construct
  misc_feature 1..23: note = source = /note="Description of Artificial Sequence: Synthetic oligonucleotide"
  source 1..23: mol_type = other RNA
atgtagaaaggcatgaagcagtt

SEQ ID NO: 2079 - RNA, 21 nt, synthetic construct
  modified_base 21: mod_base = OTHER; note = Inverted abasic nucleotide
  misc_feature 1..21: note = source = /note="Description of Artificial Sequence: Synthetic oligonucleotide"
  source 1..21: mol_type = other RNA
ctgcttcatgcctttctacan

SEQ ID NO: 2080 - RNA, 23 nt, synthetic construct
  misc_feature 1..23: note = source = /note="Description of Artificial Sequence: Synthetic oligonucleotide"
  source 1..23: mol_type = other RNA
atgtagaaaggcatgaagcagtt

SEQ ID NO: 2081 - RNA, 21 nt, synthetic construct
  modified_base 21: mod_base = OTHER; note = Inverted abasic nucleotide
  misc_feature 1..21: note = source = /note="Description of Artificial Sequence: Synthetic oligonucleotide"
  source 1..21: mol_type = other RNA
ctgcttcatgcctttctacan

SEQ ID NO: 2082 - RNA, 23 nt, synthetic construct
  misc_feature 1..23: note = source = /note="Description of Artificial Sequence: Synthetic oligonucleotide"
  source 1..23: mol_type = other RNA
atgtagaaaggcatgaagcagtt

SEQ ID NO: 2083 - RNA, 21 nt, synthetic construct
  modified_base 21: mod_base = OTHER; note = Inverted abasic nucleotide
  misc_feature 1..21: note = source = /note="Description of Artificial Sequence: Synthetic oligonucleotide"
  source 1..21: mol_type = other RNA
ctgcttcatgcctttctacan

SEQ ID NO: 2084 - RNA, 23 nt, synthetic construct
  misc_feature 1..23: note = source = /note="Description of Artificial Sequence: Synthetic oligonucleotide"
  source 1..23: mol_type = other RNA
atgtagaaaggcatgaagcagtt

SEQ ID NO: 2085 - RNA, 21 nt, synthetic construct
  modified_base 21: mod_base = OTHER; note = Inverted abasic nucleotide
  misc_feature 1..21: note = source = /note="Description of Artificial Sequence: Synthetic oligonucleotide"
  source 1..21: mol_type = other RNA
ctgcttcatgcctttctacan

SEQ ID NO: 2086 - RNA, 23 nt, synthetic construct
  misc_feature 1..23: note = source = /note="Description of Artificial Sequence: Synthetic oligonucleotide"
  source 1..23: mol_type = other RNA
atgtagaaaggcatgaagcagtt

SEQ ID NO: 2087 - RNA, 21 nt, synthetic construct
  modified_base 21: mod_base = OTHER; note = Inverted abasic nucleotide
  misc_feature 1..21: note = source = /note="Description of Artificial Sequence: Synthetic oligonucleotide"
  source 1..21: mol_type = other RNA
ctgcttcatgcctttctacan

SEQ ID NO: 2088 - RNA, 23 nt, synthetic construct
  misc_feature 1..23: note = source = /note="Description of Artificial Sequence: Synthetic oligonucleotide"
  source 1..23: mol_type = other RNA
atgtagaaaggcatgaagcagtt

SEQ ID NO: 2089 - RNA, 21 nt, synthetic construct
  modified_base 21: mod_base = OTHER; note = Inverted abasic nucleotide
  misc_feature 1..21: note = source = /note="Description of Artificial Sequence: Synthetic oligonucleotide"
  source 1..21: mol_type = other RNA
ctgcttcatgcctttctacan

SEQ ID NO: 2090 - RNA, 23 nt, synthetic construct
  misc_feature 1..23: note = source = /note="Description of Artificial Sequence: Synthetic oligonucleotide"
  source 1..23: mol_type = other RNA
atgtagaaaggcatgaagcagtt

SEQ ID NO: 2091 - RNA, 21 nt, synthetic construct
  modified_base 21: mod_base = OTHER; note = Inverted abasic nucleotide
  misc_feature 1..21: note = source = /note="Description of Artificial Sequence: Synthetic oligonucleotide"
  source 1..21: mol_type = other RNA
ctgcttcatgcctttctacan

SEQ ID NO: 2092 - RNA, 23 nt, synthetic construct
  misc_feature 1..23: note = source = /note="Description of Artificial Sequence: Synthetic oligonucleotide"
  source 1..23: mol_type = other RNA
atgtagaaaggcatgaagcagtt

SEQ ID NO: 2093 - RNA, 21 nt, synthetic construct
  modified_base 21: mod_base = OTHER; note = Inverted abasic nucleotide
  misc_feature 1..21: note = source = /note="Description of Artificial Sequence: Synthetic oligonucleotide"
  source 1..21: mol_type = other RNA
ctgcttcatgcctttctacan

SEQ ID NO: 2094 - RNA, 23 nt, synthetic construct
  misc_feature 1..23: note = source = /note="Description of Artificial Sequence: Synthetic oligonucleotide"
  source 1..23: mol_type = other RNA
atgtagaaaggcatgaagcagtt

SEQ ID NO: 2095 - RNA, 21 nt, synthetic construct
  modified_base 21: mod_base = OTHER; note = Inverted abasic nucleotide
  misc_feature 1..21: note = source = /note="Description of Artificial Sequence: Synthetic oligonucleotide"
  source 1..21: mol_type = other RNA
ctgcttcatgcctttctacan

SEQ ID NO: 2096 - RNA, 23 nt, synthetic construct
  misc_feature 1..23: note = source = /note="Description of Artificial Sequence: Synthetic oligonucleotide"
  source 1..23: mol_type = other RNA
atgtagaaaggcatgaagcagtt

SEQ ID NO: 2097 - RNA, 21 nt, synthetic construct
  modified_base 21: mod_base = OTHER; note = Inverted abasic nucleotide
  misc_feature 1..21: note = source = /note="Description of Artificial Sequence: Synthetic oligonucleotide"
  source 1..21: mol_type = other RNA
ctgcttcatgcctttctacan

SEQ ID NO: 2098 - RNA, 23 nt, synthetic construct
  misc_feature 1..23: note = source = /note="Description of Artificial Sequence: Synthetic oligonucleotide"
  source 1..23: mol_type = other RNA
atgtagaaaggcatgaagcagtt

SEQ ID NO: 2099 - RNA, 21 nt, synthetic construct
  modified_base 21: mod_base = OTHER; note = Inverted abasic nucleotide
  misc_feature 1..21: note = source = /note="Description of Artificial Sequence: Synthetic oligonucleotide"
  source 1..21: mol_type = other RNA
ctgcttcatgcctttctacan

SEQ ID NO: 2100 - RNA, 23 nt, synthetic construct
  misc_feature 1..23: note = source = /note="Description of Artificial Sequence: Synthetic oligonucleotide"
  source 1..23: mol_type = other RNA
atgtagaaaggcatgaagcagtt

SEQ ID NO: 2101 - RNA, 21 nt, synthetic construct
  modified_base 21: mod_base = OTHER; note = Inverted abasic nucleotide
  misc_feature 1..21: note = source = /note="Description of Artificial Sequence: Synthetic oligonucleotide"
  source 1..21: mol_type = other RNA
ctgcttcatgcctttctacan

SEQ ID NO: 2102 - RNA, 23 nt, synthetic construct
  misc_feature 1..23: note = source = /note="Description of Artificial Sequence: Synthetic oligonucleotide"
  source 1..23: mol_type = other RNA
atgtagaaaggcatgaagcagtt

SEQ ID NO: 2103 - RNA, 21 nt, synthetic construct
  modified_base 21: mod_base = OTHER; note = Inverted abasic nucleotide
  misc_feature 1..21: note = source = /note="Description of Artificial Sequence: Synthetic oligonucleotide"
  source 1..21: mol_type = other RNA
ctgcttcatgcctttctacan

SEQ ID NO: 2104 - RNA, 23 nt, synthetic construct
  misc_feature 1..23: note = source = /note="Description of Artificial Sequence: Synthetic oligonucleotide"
  source 1..23: mol_type = other RNA
atgtagaaaggcatgaagcagtt

SEQ ID NO: 2105 - RNA, 21 nt, synthetic construct
  modified_base 21: mod_base = OTHER; note = Inverted abasic nucleotide
  misc_feature 1..21: note = source = /note="Description of Artificial Sequence: Synthetic oligonucleotide"
  source 1..21: mol_type = other RNA
ctgcttcatgcctttctacan

SEQ ID NO: 2106 - RNA, 23 nt, synthetic construct
  misc_feature 1..23: note = source = /note="Description of Artificial Sequence: Synthetic oligonucleotide"
  source 1..23: mol_type = other RNA
atgtagaaaggcatgaagcagtt

SEQ ID NO: 2107 - RNA, 21 nt, synthetic construct
  modified_base 21: mod_base = OTHER; note = Inverted abasic nucleotide
  misc_feature 1..21: note = source = /note="Description of Artificial Sequence: Synthetic oligonucleotide"
  source 1..21: mol_type = other RNA
ctgcttcatgcctttctacan

SEQ ID NO: 2108 - RNA, 23 nt, synthetic construct
  misc_feature 1..23: note = source = /note="Description of Artificial Sequence: Synthetic oligonucleotide"
  source 1..23: mol_type = other RNA
atgtagaaaggcatgaagcagtt

SEQ ID NO: 2109 - RNA, 21 nt, synthetic construct
  modified_base 21: mod_base = OTHER; note = Inverted abasic nucleotide
  misc_feature 1..21: note = source = /note="Description of Artificial Sequence: Synthetic oligonucleotide"
  source 1..21: mol_type = other RNA
ctgcttcatgcctttctacan

SEQ ID NO: 2110 - RNA, 23 nt, synthetic construct
  misc_feature 1..23: note = source = /note="Description of Artificial Sequence: Synthetic oligonucleotide"
  source 1..23: mol_type = other RNA
atgtagaaaggcatgaagcagtt

SEQ ID NO: 2111 - RNA, 21 nt, synthetic construct
  modified_base 21: mod_base = OTHER; note = Inverted abasic nucleotide
  misc_feature 1..21: note = source = /note="Description of Artificial Sequence: Synthetic oligonucleotide"
  source 1..21: mol_type = other RNA
ctgcttcatgcctttctacan

SEQ ID NO: 2112 - DNA, 23 bp, synthetic construct
  misc_feature 1..23: note = source = /note="Description of Artificial Sequence: Synthetic oligonucleotide"
  misc_feature 1..23: note = source = /note="Description of Combined DNA/RNA Molecule: Synthetic oligonucleotide"
  source 1..23: mol_type = other DNA
atgtagaaaggcatgaagcagtt

SEQ ID NO: 2113 - RNA, 21 nt, synthetic construct
  modified_base 21: mod_base = OTHER; note = Inverted abasic nucleotide
  misc_feature 1..21: note = source = /note="Description of Artificial Sequence: Synthetic oligonucleotide"
  source 1..21: mol_type = other RNA
ctgcttcatgcctttctacan

SEQ ID NO: 2114 - DNA, 23 bp, synthetic construct
  misc_feature 1..23: note = source = /note="Description of Artificial Sequence: Synthetic oligonucleotide"
  misc_feature 1..23: note = source = /note="Description of Combined DNA/RNA Molecule: Synthetic oligonucleotide"
  source 1..23: mol_type = other DNA
atgtagaaaggcatgaagcagtt

SEQ ID NO: 2115 - RNA, 21 nt, synthetic construct
  modified_base 21: mod_base = OTHER; note = Inverted abasic nucleotide
  misc_feature 1..21: note = source = /note="Description of Artificial Sequence: Synthetic oligonucleotide"
  source 1..21: mol_type = other RNA
ctgcttcatgcctttctacan

SEQ ID NO: 2116 - DNA, 23 bp, synthetic construct
  misc_feature 1..23: note = source = /note="Description of Artificial Sequence: Synthetic oligonucleotide"
  misc_feature 1..23: note = source = /note="Description of Combined DNA/RNA Molecule: Synthetic oligonucleotide"
  source 1..23: mol_type = other DNA
atgtagaaaggcatgaagcagtt

SEQ ID NO: 2117 - RNA, 21 nt, synthetic construct
  modified_base 21: mod_base = OTHER; note = Inverted abasic nucleotide
  misc_feature 1..21: note = source = /note="Description of Artificial Sequence: Synthetic oligonucleotide"
  source 1..21: mol_type = other RNA
ctgcttcatgcctttctacan

SEQ ID NO: 2118 - RNA, 23 nt, synthetic construct
  misc_feature 1..23: note = source = /note="Description of Artificial Sequence: Synthetic oligonucleotide"
  source 1..23: mol_type = other RNA
atgtagaaaggcatgaagcagtt

SEQ ID NO: 2119 - RNA, 21 nt, synthetic construct
  modified_base 21: mod_base = OTHER; note = Inverted abasic nucleotide
  misc_feature 1..21: note = source = /note="Description of Artificial Sequence: Synthetic oligonucleotide"
  source 1..21: mol_type = other RNA
ctgcttcatgcctttctacan

SEQ ID NO: 2120 - RNA, 23 nt, synthetic construct
  misc_feature 1..23: note = source = /note="Description of Artificial Sequence: Synthetic oligonucleotide"
  source 1..23: mol_type = other RNA
atgtagaaaggcatgaagcagtt

SEQ ID NO: 2121 - RNA, 21 nt, synthetic construct
  modified_base 21: mod_base = OTHER; note = Inverted abasic nucleotide
  misc_feature 1..21: note = source = /note="Description of Artificial Sequence: Synthetic oligonucleotide"
  source 1..21: mol_type = other RNA
ctgcttcatgcctttctacan

SEQ ID NO: 2122 - RNA, 23 nt, synthetic construct
  misc_feature 1..23: note = source = /note="Description of Artificial Sequence: Synthetic oligonucleotide"
  source 1..23: mol_type = other RNA
atgtagaaaggcatgaagcagtt

SEQ ID NO: 2123 - RNA, 21 nt, synthetic construct
  modified_base 21: mod_base = OTHER; note = Inverted abasic nucleotide
  misc_feature 1..21: note = source = /note="Description of Artificial Sequence: Synthetic oligonucleotide"
  source 1..21: mol_type = other RNA
ctgcttcatgcctttctacan

SEQ ID NO: 2124 - RNA, 23 nt, synthetic construct
  misc_feature 1..23: note = source = /note="Description of Artificial Sequence: Synthetic oligonucleotide"
  source 1..23: mol_type = other RNA
atgtagaaaggcatgaagcagtt

SEQ ID NO: 2125 - RNA, 21 nt, synthetic construct
  modified_base 21: mod_base = OTHER; note = Inverted abasic nucleotide
  misc_feature 1..21: note = source = /note="Description of Artificial Sequence: Synthetic oligonucleotide"
  source 1..21: mol_type = other RNA
ctgcttcatgcctttctacan

SEQ ID NO: 2126 - RNA, 23 nt, synthetic construct
  misc_feature 1..23: note = source = /note="Description of Artificial Sequence: Synthetic oligonucleotide"
  source 1..23: mol_type = other RNA
atgtagaaaggcatgaagcagtt

SEQ ID NO: 2127 - RNA, 21 nt, synthetic construct
  modified_base 21: mod_base = OTHER; note = Inverted abasic nucleotide
  misc_feature 1..21: note = source = /note="Description of Artificial Sequence: Synthetic oligonucleotide"
  source 1..21: mol_type = other RNA
ctgcttcatgcctttctacan

SEQ ID NO: 2128 - RNA, 23 nt, synthetic construct
  misc_feature 1..23: note = source = /note="Description of Artificial Sequence: Synthetic oligonucleotide"
  source 1..23: mol_type = other RNA
atgtagaaaggcatgaagcagtt

SEQ ID NO: 2129 - RNA, 21 nt, synthetic construct
  modified_base 21: mod_base = OTHER; note = Inverted abasic nucleotide
  misc_feature 1..21: note = source = /note="Description of Artificial Sequence: Synthetic oligonucleotide"
  source 1..21: mol_type = other RNA
ctgcttcatgcctttctacan

SEQ ID NO: 2130 - RNA, 23 nt, synthetic construct
  misc_feature 1..23: note = source = /note="Description of Artificial Sequence: Synthetic oligonucleotide"
  source 1..23: mol_type = other RNA
atgtagaaaggcatgaagcagtt

SEQ ID NO: 2131 - DNA, 21 bp, synthetic construct
  misc_feature 1..21: note = source = /note="Description of Artificial Sequence: Synthetic oligonucleotide"
  misc_feature 1..21: note = source = /note="Description of Combined DNA/RNA Molecule: Synthetic oligonucleotide"
  source 1..21: mol_type = other DNA
tgcttcatgcctttctacaga

SEQ ID NO: 2132 - RNA, 23 nt, synthetic construct
  misc_feature 1..23: note = source = /note="Description of Artificial Sequence: Synthetic oligonucleotide"
  source 1..23: mol_type = other RNA
tctgtagaaaggcatgaagcatt

SEQ ID NO: 2133 - DNA, 21 bp, synthetic construct
  misc_feature 1..21: note = source = /note="Description of Artificial Sequence: Synthetic oligonucleotide"
  misc_feature 1..21: note = source = /note="Description of Combined DNA/RNA Molecule: Synthetic oligonucleotide"
  source 1..21: mol_type = other DNA
tgcttcatgcctttctacaga

SEQ ID NO: 2134 - RNA, 23 nt, synthetic construct
  misc_feature 1..23: note = source = /note="Description of Artificial Sequence: Synthetic oligonucleotide"
  source 1..23: mol_type = other RNA
tctgtagaaaggcatgaagcatt

SEQ ID NO: 2135 - DNA, 21 bp, synthetic construct
  misc_feature 1..21: note = source = /note="Description of Artificial Sequence: Synthetic oligonucleotide"
  misc_feature 1..21: note = source = /note="Description of Combined DNA/RNA Molecule: Synthetic oligonucleotide"
  source 1..21: mol_type = other DNA
tgcttcatgcctttctacaga

SEQ ID NO: 2136 - RNA, 23 nt, synthetic construct
  misc_feature 1..23: note = source = /note="Description of Artificial Sequence: Synthetic oligonucleotide"
  source 1..23: mol_type = other RNA
tctgtagaaaggcatgaagcatt

SEQ ID NO: 2137 - DNA, 21 bp, synthetic construct
  misc_feature 1..21: note = source = /note="Description of Artificial Sequence: Synthetic oligonucleotide"
  misc_feature 1..21: note = source = /note="Description of Combined DNA/RNA Molecule: Synthetic oligonucleotide"
  source 1..21: mol_type = other DNA
tgcttcatgcctttctacaga

SEQ ID NO: 2138 - RNA, 23 nt, synthetic construct
  misc_feature 1..23: note = source = /note="Description of Artificial Sequence: Synthetic oligonucleotide"
  source 1..23: mol_type = other RNA
tctgtagaaaggcatgaagcatt

SEQ ID NO: 2139 - DNA, 21 bp, synthetic construct
  misc_feature 1..21: note = source = /note="Description of Artificial Sequence: Synthetic oligonucleotide"
  misc_feature 1..21: note = source = /note="Description of Combined DNA/RNA Molecule: Synthetic oligonucleotide"
  source 1..21: mol_type = other DNA
tgcttcatgcctttctacaga

SEQ ID NO: 2140 - RNA, 23 nt, synthetic construct
  misc_feature 1..23: note = source = /note="Description of Artificial Sequence: Synthetic oligonucleotide"
  source 1..23: mol_type = other RNA
tctgtagaaaggcatgaagcatt

SEQ ID NO: 2141 - DNA, 21 bp, synthetic construct
  misc_feature 1..21: note = source = /note="Description of Artificial Sequence: Synthetic oligonucleotide"
  misc_feature 1..21: note = source = /note="Description of Combined DNA/RNA Molecule: Synthetic oligonucleotide"
  source 1..21: mol_type = other DNA
tgcttcatgcctttctacaga

SEQ ID NO: 2142 - RNA, 23 nt, synthetic construct
  modified_base 2: mod_base = OTHER; note = Abasic nucleotide
  misc_feature 1..23: note = source = /note="Description of Artificial Sequence: Synthetic oligonucleotide"
  source 1..23: mol_type = other RNA
tntgtagaaaggcatgaagcatt

SEQ ID NO: 2143 - DNA, 21 bp, synthetic construct
  misc_feature 1..21: note = source = /note="Description of Artificial Sequence: Synthetic oligonucleotide"
  misc_feature 1..21: note = source = /note="Description of Combined DNA/RNA Molecule: Synthetic oligonucleotide"
  source 1..21: mol_type = other DNA
tgcttcatgcctttctacaga

SEQ ID NO: 2144 - RNA, 23 nt, synthetic construct
  modified_base 3: mod_base = OTHER; note = Abasic nucleotide
  misc_feature 1..23: note = source = /note="Description of Artificial Sequence: Synthetic oligonucleotide"
  source 1..23: mol_type = other RNA
tcngtagaaaggcatgaagcatt

SEQ ID NO: 2145 - DNA, 21 bp, synthetic construct
  misc_feature 1..21: note = source = /note="Description of Artificial Sequence: Synthetic oligonucleotide"
  misc_feature 1..21: note = source = /note="Description of Combined DNA/RNA Molecule: Synthetic oligonucleotide"
  source 1..21: mol_type = other DNA
tgcttcatgcctttctacaga

SEQ ID NO: 2146 - RNA, 23 nt, synthetic construct
  modified_base 4: mod_base = OTHER; note = Abasic nucleotide
  misc_feature 1..23: note = source = /note="Description of Artificial Sequence: Synthetic oligonucleotide"
  source 1..23: mol_type = other RNA
tctntagaaaggcatgaagcatt

SEQ ID NO: 2147 - DNA, 21 bp, synthetic construct
  misc_feature 1..21: note = source = /note="Description of Artificial Sequence: Synthetic oligonucleotide"
  misc_feature 1..21: note = source = /note="Description of Combined DNA/RNA Molecule: Synthetic oligonucleotide"
  source 1..21: mol_type = other DNA
tgcttcatgcctttctacaga

SEQ ID NO: 2148 - RNA, 23 nt, synthetic construct
  modified_base 5: mod_base = OTHER; note = Abasic nucleotide
  misc_feature 1..23: note = source = /note="Description of Artificial Sequence: Synthetic oligonucleotide"
  source 1..23: mol_type = other RNA
tctgnagaaaggcatgaagcatt

SEQ ID NO: 2149 - DNA, 21 bp, synthetic construct
  misc_feature 1..21: note = source = /note="Description of Artificial Sequence: Synthetic oligonucleotide"
  misc_feature 1..21: note = source = /note="Description of Combined DNA/RNA Molecule: Synthetic oligonucleotide"
  source 1..21: mol_type = other DNA
tgcttcatgcctttctacaga

SEQ ID NO: 2150 - RNA, 23 nt, synthetic construct
  modified_base 6: mod_base = OTHER; note = Abasic nucleotide
  misc_feature 1..23: note = source = /note="Description of Artificial Sequence: Synthetic oligonucleotide"
  source 1..23: mol_type = other RNA
tctgtngaaaggcatgaagcatt

SEQ ID NO: 2151 - DNA, 21 bp, synthetic construct
  misc_feature 1..21: note = source = /note="Description of Artificial Sequence: Synthetic oligonucleotide"
  misc_feature 1..21: note = source = /note="Description of Combined DNA/RNA Molecule: Synthetic oligonucleotide"
  source 1..21: mol_type = other DNA
tgcttcatgcctttctacaga

SEQ ID NO: 2152 - RNA, 23 nt, synthetic construct
  modified_base 7: mod_base = OTHER; note = Abasic nucleotide
  misc_feature 1..23: note = source = /note="Description of Artificial Sequence: Synthetic oligonucleotide"
  source 1..23: mol_type = other RNA
tctgtanaaaggcatgaagcatt

SEQ ID NO: 2153 - DNA, 21 bp, synthetic construct
  misc_feature 1..21: note = source = /note="Description of Artificial Sequence: Synthetic oligonucleotide"
  misc_feature 1..21: note = source = /note="Description of Combined DNA/RNA Molecule: Synthetic oligonucleotide"
  source 1..21: mol_type = other DNA
tgcttcatgcctttctacaga

SEQ ID NO: 2154 - RNA, 23 nt, synthetic construct
  modified_base 8: mod_base = OTHER; note = Abasic nucleotide
  misc_feature 1..23: note = source = /note="Description of Artificial Sequence: Synthetic oligonucleotide"
  source 1..23: mol_type = other RNA
tctgtagnaaggcatgaagcatt

SEQ ID NO: 2155 - DNA, 21 bp, synthetic construct
  misc_feature 1..21: note = source = /note="Description of Artificial Sequence: Synthetic oligonucleotide"
  misc_feature 1..21: note = source = /note="Description of Combined DNA/RNA Molecule: Synthetic oligonucleotide"
  source 1..21: mol_type = other DNA
tcatgcctttctacagtggct

SEQ ID NO: 2156 - RNA, 23 nt, synthetic construct
  misc_feature 1..23: note = source = /note="Description of Artificial Sequence: Synthetic oligonucleotide"
  source 1..23: mol_type = other RNA
agccactgtagaaaggcatgatt

SEQ ID NO: 2157 - RNA, 21 nt, synthetic construct
  modified_base 21: mod_base = OTHER; note = Inverted abasic nucleotide
  misc_feature 1..21: note = source = /note="Description of Artificial Sequence: Synthetic oligonucleotide"
  source 1..21: mol_type = other RNA
tcatgcctttctacagtggcn

SEQ ID NO: 2158 - RNA, 23 nt, synthetic construct
  misc_feature 1..23: note = source = /note="Description of Artificial Sequence: Synthetic oligonucleotide"
  source 1..23: mol_type = other RNA
tgccactgtagaaaggcatgatt

SEQ ID NO: 2159 - DNA, 21 bp, synthetic construct
  misc_feature 1..21: note = source = /note="Description of Artificial Sequence: Synthetic oligonucleotide"
  misc_feature 1..21: note = source = /note="Description of Combined DNA/RNA Molecule: Synthetic oligonucleotide"
  source 1..21: mol_type = other DNA
tcatgcctttctacagtggca

SEQ ID NO: 2160 - RNA, 23 nt, synthetic construct
  misc_feature 1..23: note = source = /note="Description of Artificial Sequence: Synthetic oligonucleotide"
  source 1..23: mol_type = other RNA
tgccactgtagaaaggcatgatt

SEQ ID NO: 2161 - DNA, 21 bp, synthetic construct
  misc_feature 1..21: note = source = /note="Description of Artificial Sequence: Synthetic oligonucleotide"
  misc_feature 1..21: note = source = /note="Description of Combined DNA/RNA Molecule: Synthetic oligonucleotide"
  source 1..21: mol_type = other DNA
tcctgcttcatgcctttctat

SEQ ID NO: 2162 - RNA, 23 nt, synthetic construct
  misc_feature 1..23: note = source = /note="Description of Artificial Sequence: Synthetic oligonucleotide"
  source 1..23: mol_type = other RNA
atagaaaggcatgaagcaggatt

SEQ ID NO: 2163 - RNA, 21 nt, synthetic construct
  modified_base 21: mod_base = OTHER; note = Inverted abasic nucleotide
  misc_feature 1..21: note = source = /note="Description of Artificial Sequence: Synthetic oligonucleotide"
  source 1..21: mol_type = other RNA
tcctgcttcatgcctttctan

SEQ ID NO: 2164 - RNA, 23 nt, synthetic construct
  misc_feature 1..23: note = source = /note="Description of Artificial Sequence: Synthetic oligonucleotide"
  source 1..23: mol_type = other RNA
ttagaaaggcatgaagcaggatt

SEQ ID NO: 2165 - DNA, 21 bp, synthetic construct
  misc_feature 1..21: note = source = /note="Description of Artificial Sequence: Synthetic oligonucleotide"
  misc_feature 1..21: note = source = /note="Description of Combined DNA/RNA Molecule: Synthetic oligonucleotide"
  source 1..21: mol_type = other DNA
tcctgcttcatgcctttctaa

SEQ ID NO: 2166 - RNA, 23 nt, synthetic construct
  misc_feature 1..23: note = source = /note="Description of Artificial Sequence: Synthetic oligonucleotide"
  source 1..23: mol_type = other RNA
ttagaaaggcatgaagcaggatt

SEQ ID NO: 2167 - DNA, 21 bp, synthetic construct
  misc_feature 1..21: note = source = /note="Description of Artificial Sequence: Synthetic oligonucleotide"
  misc_feature 1..21: note = source = /note="Description of Combined DNA/RNA Molecule: Synthetic oligonucleotide"
  source 1..21: mol_type = other DNA
tatgttcctgcttcatgcctt

SEQ ID NO: 2168 - RNA, 23 nt, synthetic construct
  misc_feature 1..23: note = source = /note="Description of Artificial Sequence: Synthetic oligonucleotide"
  source 1..23: mol_type = other RNA
aaggcatgaagcaggaacatatt

SEQ ID NO: 2169 - RNA, 21 nt, synthetic construct
  modified_base 21: mod_base = OTHER; note = Inverted abasic nucleotide
  misc_feature 1..21: note = source = /note="Description of Artificial Sequence: Synthetic oligonucleotide"
  source 1..21: mol_type = other RNA
tatgttcctgcttcatgcctn

SEQ ID NO: 2170 - RNA, 23 nt, synthetic construct
  misc_feature 1..23: note = source = /note="Description of Artificial Sequence: Synthetic oligonucleotide"
  source 1..23: mol_type = other RNA
taggcatgaagcaggaacatatt

SEQ ID NO: 2171 - DNA, 21 bp, synthetic construct
  misc_feature 1..21: note = source = /note="Description of Artificial Sequence: Synthetic oligonucleotide"
  misc_feature 1..21: note = source = /note="Description of Combined DNA/RNA Molecule: Synthetic oligonucleotide"
  source 1..21: mol_type = other DNA
tatgttcctgcttcatgccta

SEQ ID NO: 2172 - RNA, 23 nt, synthetic construct
  misc_feature 1..23: note = source = /note="Description of Artificial Sequence: Synthetic oligonucleotide"
  source 1..23: mol_type = other RNA
taggcatgaagcaggaacatatt

SEQ ID NO: 2173 - RNA, 21 nt, synthetic construct
  modified_base 21: mod_base = OTHER; note = Inverted abasic nucleotide
  misc_feature 1..21: note = source = /note="Description of Artificial Sequence: Synthetic oligonucleotide"
  source 1..21: mol_type = other RNA
tcctgcttcatgcctttctan

SEQ ID NO: 2174 - RNA, 23 nt, synthetic construct
  misc_feature 1..23: note = source = /note="Description of Artificial Sequence: Synthetic oligonucleotide"
  source 1..23: mol_type = other RNA
atagaaaggcatgaagcaggatt

SEQ ID NO: 2175 - RNA, 21 nt, synthetic construct
  modified_base 21: mod_base = OTHER; note = Inverted abasic nucleotide
  misc_feature 1..21: note = source = /note="Description of Artificial Sequence: Synthetic oligonucleotide"
  source 1..21: mol_type = other RNA
tatgttcctgcttcatgcctn

SEQ ID NO: 2176 - RNA, 23 nt, synthetic construct
  misc_feature 1..23: note = source = /note="Description of Artificial Sequence: Synthetic oligonucleotide"
  source 1..23: mol_type = other RNA
aaggcatgaagcaggaacatatt

SEQ ID NO: 2177 - DNA, 21 bp, synthetic construct
  misc_feature 1..21: note = source = /note="Description of Artificial Sequence: Synthetic oligonucleotide"
  misc_feature 1..21: note = source = /note="Description of Combined DNA/RNA Molecule: Synthetic oligonucleotide"
  source 1..21: mol_type = other DNA
tcatgcctttctacagtggct

SEQ ID NO: 2178 - RNA, 23 nt, synthetic construct
  misc_feature 1..23: note = source = /note="Description of Artificial Sequence: Synthetic oligonucleotide"
  source 1..23: mol_type = other RNA
agccactgtagaaaggcatgatt

SEQ ID NO: 2179 - DNA, 21 bp, synthetic construct
  misc_feature 1..21: note = source = /note="Description of Artificial Sequence: Synthetic oligonucleotide"
  misc_feature 1..21: note = source = /note="Description of Combined DNA/RNA Molecule: Synthetic oligonucleotide"
  source 1..21: mol_type = other DNA
tcctgcttcatgcctttctat

SEQ ID NO: 2180 - RNA, 23 nt, synthetic construct
  misc_feature 1..23: note = source = /note="Description of Artificial Sequence: Synthetic oligonucleotide"
  source 1..23: mol_type = other RNA
atagaaaggcatgaagcaggatt

SEQ ID NO: 2181 - DNA, 21 bp, synthetic construct
  misc_feature 1..21: note = source = /note="Description of Artificial Sequence: Synthetic oligonucleotide"
  misc_feature 1..21: note = source = /note="Description of Combined DNA/RNA Molecule: Synthetic oligonucleotide"
  source 1..21: mol_type = other DNA
tcctgcttcatgcctttctaa

SEQ ID NO: 2182 - RNA, 23 nt, synthetic construct
  misc_feature 1..23: note = source = /note="Description of Artificial Sequence: Synthetic oligonucleotide"
  source 1..23: mol_type = other RNA
ttagaaaggcatgaagcaggatt

SEQ ID NO: 2183 - DNA, 21 bp, synthetic construct
  misc_feature 1..21: note = source = /note="Description of Artificial Sequence: Synthetic oligonucleotide"
  misc_feature 1..21: note = source = /note="Description of Combined DNA/RNA Molecule: Synthetic oligonucleotide"
  source 1..21: mol_type = other DNA
tatgttcctgcttcatgccta

SEQ ID NO: 2184 - RNA, 23 nt, synthetic construct
  misc_feature 1..23: note = source = /note="Description of Artificial Sequence: Synthetic oligonucleotide"
  source 1..23: mol_type = other RNA
taggcatgaagcaggaacatatt

SEQ ID NO: 2185 - DNA, 21 bp, synthetic construct
  misc_feature 1..21: note = source = /note="Description of Artificial Sequence: Synthetic oligonucleotide"
  misc_feature 1..21: note = source = /note="Description of Combined DNA/RNA Molecule: Synthetic oligonucleotide"
  source 1..21: mol_type = other DNA
tgcttcatgcctttctacaga

SEQ ID NO: 2186 - RNA, 23 nt, synthetic construct
  misc_feature 1..23: note = source = /note="Description of Artificial Sequence: Synthetic oligonucleotide"
  source 1..23: mol_type = other RNA
tctgtagaaaggcatgaagcatt

SEQ ID NO: 2187 - RNA, 21 nt, synthetic construct
  modified_base 21: mod_base = OTHER; note = Inverted abasic nucleotide
  misc_feature 1..21: note = source = /note="Description of Artificial Sequence: Synthetic oligonucleotide"
  source 1..21: mol_type = other RNA
ctgcttcatgcctttctacan

SEQ ID NO: 2188 - RNA, 23 nt, synthetic construct
  misc_feature 1..23: note = source = /note="Description of Artificial Sequence: Synthetic oligonucleotide"
  source 1..23: mol_type = other RNA
atgtagaaaggcatgaagcagtt

SEQ ID NO: 2189 - RNA, 21 nt, synthetic construct
  modified_base 21: mod_base = OTHER; note = Inverted abasic nucleotide
  misc_feature 1..21: note = source = /note="Description of Artificial Sequence: Synthetic oligonucleotide"
  source 1..21: mol_type = other RNA
ctgcttcatgcctttctacan

SEQ ID NO: 2190 - RNA, 23 nt, synthetic construct
  misc_feature 1..23: note = source = /note="Description of Artificial Sequence: Synthetic oligonucleotide"
  source 1..23: mol_type = other RNA
atgtagaaaggcatgaagcagtt

SEQ ID NO: 2191 - RNA, 21 nt, synthetic construct
  modified_base 21: mod_base = OTHER; note = Inverted abasic nucleotide
  misc_feature 1..21: note = source = /note="Description of Artificial Sequence: Synthetic oligonucleotide"
  source 1..21: mol_type = other RNA
ctgcttcatgcctttctacan

SEQ ID NO: 2192 - RNA, 23 nt, synthetic construct
  misc_feature 1..23: note = source = /note="Description of Artificial Sequence: Synthetic oligonucleotide"
  source 1..23: mol_type = other RNA
atgtagaaaggcatgaagcagtt

SEQ ID NO: 2193 - RNA, 21 nt, synthetic construct
  modified_base 21: mod_base = OTHER; note = Inverted abasic nucleotide
  misc_feature 1..21: note = source = /note="Description of Artificial Sequence: Synthetic oligonucleotide"
  source 1..21: mol_type = other RNA
ctgcttcatgcctttctacan

SEQ ID NO: 2194 - RNA, 23 nt, synthetic construct
  misc_feature 1..23: note = source = /note="Description of Artificial Sequence: Synthetic oligonucleotide"
  source 1..23: mol_type = other RNA
atgtagaaaggcatgaagcagtt

SEQ ID NO: 2195 - RNA, 21 nt, synthetic construct
  modified_base 21: mod_base = OTHER; note = Inverted abasic nucleotide
  misc_feature 1..21: note = source = /note="Description of Artificial Sequence: Synthetic oligonucleotide"
  source 1..21: mol_type = other RNA
ctgcttcatgcctttctacan

SEQ ID NO: 2196 - RNA, 23 nt, synthetic construct
  misc_feature 1..23: note = source = /note="Description of Artificial Sequence: Synthetic oligonucleotide"
  source 1..23: mol_type = other RNA
atgtagaaaggcatgaagcagtt

SEQ ID NO: 2197 - RNA, 21 nt, synthetic construct
  modified_base 21: mod_base = OTHER; note = Inverted abasic nucleotide
  misc_feature 1..21: note = source = /note="Description of Artificial Sequence: Synthetic oligonucleotide"
  source 1..21: mol_type = other RNA
ctgcttcatgcctttctacan

SEQ ID NO: 2198 - RNA, 23 nt, synthetic construct
  misc_feature 1..23: note = source = /note="Description of Artificial Sequence: Synthetic oligonucleotide"
  source 1..23: mol_type = other RNA
atgtagaaaggcatgaagcagtt

SEQ ID NO: 2199 - RNA, 21 nt, synthetic construct
  modified_base 21: mod_base = OTHER; note = Inverted abasic nucleotide
  misc_feature 1..21: note = source = /note="Description of Artificial Sequence: Synthetic oligonucleotide"
  source 1..21: mol_type = other RNA
ctgcttcatgcctttctacan

SEQ ID NO: 2200 - RNA, 23 nt, synthetic construct
  misc_feature 1..23: note = source = /note="Description of Artificial Sequence: Synthetic oligonucleotide"
  source 1..23: mol_type = other RNA
atgtagaaaggcatgaagcagtt

SEQ ID NO: 2201 - RNA, 21 nt, synthetic construct
  modified_base 21: mod_base = OTHER; note = Inverted abasic nucleotide
  misc_feature 1..21: note = source = /note="Description of Artificial Sequence: Synthetic oligonucleotide"
  source 1..21: mol_type = other RNA
ctgcttcatgcctttctacan

SEQ ID NO: 2202 - RNA, 23 nt, synthetic construct
  misc_feature 1..23: note = source = /note="Description of Artificial Sequence: Synthetic oligonucleotide"
  source 1..23: mol_type = other RNA
atgtagaaaggcatgaagcagtt

SEQ ID NO: 2203 - RNA, 21 nt, synthetic construct
  modified_base 21: mod_base = OTHER; note = Inverted abasic nucleotide
  misc_feature 1..21: note = source = /note="Description of Artificial Sequence: Synthetic oligonucleotide"
  source 1..21: mol_type = other RNA
ctgcttcatgcctttctacan

SEQ ID NO: 2204 - RNA, 23 nt, synthetic construct
  misc_feature 1..23: note = source = /note="Description of Artificial Sequence: Synthetic oligonucleotide"
  source 1..23: mol_type = other RNA
atgtagaaaggcatgaagcagtt

SEQ ID NO: 2205 - DNA, 21 bp, synthetic construct
  modified_base 21: mod_base = OTHER; note = Inverted abasic nucleotide
  misc_feature 1..21: note = source = /note="Description of Artificial Sequence: Synthetic oligonucleotide"
  misc_feature 1..21: note = source = /note="Description of Combined DNA/RNA Molecule: Synthetic oligonucleotide"
  source 1..21: mol_type = other DNA
ctgcttcatgcctttctacan

SEQ ID NO: 2206 - RNA, 23 nt, synthetic construct
  misc_feature 1..23: note = source = /note="Description of Artificial Sequence: Synthetic oligonucleotide"
  source 1..23: mol_type = other RNA
atgtagaaaggcatgaagcagtt

SEQ ID NO: 2207 - DNA, 21 bp, synthetic construct
  modified_base 21: mod_base = OTHER; note = Inverted abasic nucleotide
  misc_feature 1..21: note = source = /note="Description of Artificial Sequence: Synthetic oligonucleotide"
  misc_feature 1..21: note = source = /note="Description of Combined DNA/RNA Molecule: Synthetic oligonucleotide"
  source 1..21: mol_type = other DNA
ctgcttcatgcctttctacan

SEQ ID NO: 2208 - RNA, 23 nt, synthetic construct
  misc_feature 1..23: note = source = /note="Description of Artificial Sequence: Synthetic oligonucleotide"
  source 1..23: mol_type = other RNA
atgtagaaaggcatgaagcagtt

SEQ ID NO: 2209 - DNA, 21 bp, synthetic construct
  modified_base 21: mod_base = OTHER; note = Inverted abasic nucleotide
  misc_feature 1..21: note = source = /note="Description of Artificial Sequence: Synthetic oligonucleotide"
  misc_feature 1..21: note = source = /note="Description of Combined DNA/RNA Molecule: Synthetic oligonucleotide"
  source 1..21: mol_type = other DNA
ctgcttcatgcctttctacan

SEQ ID NO: 2210 - RNA, 23 nt, synthetic construct
  misc_feature 1..23: note = source = /note="Description of Artificial Sequence: Synthetic oligonucleotide"
  source 1..23: mol_type = other RNA
atgtagaaaggcatgaagcagtt

SEQ ID NO: 2211 - DNA, 21 bp, synthetic construct
  modified_base 21: mod_base = OTHER; note = Inverted abasic nucleotide
  misc_feature 1..21: note = source = /note="Description of Artificial Sequence: Synthetic oligonucleotide"
  misc_feature 1..21: note = source = /note="Description of Combined DNA/RNA Molecule: Synthetic oligonucleotide"
  source 1..21: mol_type = other DNA
ctgcttcatgcctttctacan

SEQ ID NO: 2212 - RNA, 23 nt, synthetic construct
  misc_feature 1..23: note = source = /note="Description of Artificial Sequence: Synthetic oligonucleotide"
  source 1..23: mol_type = other RNA
atgtagaaaggcatgaagcagtt

SEQ ID NO: 2213 - RNA, 21 nt, synthetic construct
  modified_base 21: mod_base = OTHER; note = Inverted abasic nucleotide
  misc_feature 1..21: note = source = /note="Description of Artificial Sequence: Synthetic oligonucleotide"
  source 1..21: mol_type = other RNA
ctgcttcatgcctttctacan

SEQ ID NO: 2214 - RNA, 23 nt, synthetic construct
  misc_feature 1..23: note = source = /note="Description of Artificial Sequence: Synthetic oligonucleotide"
  source 1..23: mol_type = other RNA
atgtagaaaggcatgaagcagtt

SEQ ID NO: 2215 - RNA, 21 nt, synthetic construct
  modified_base 21: mod_base = OTHER; note = Inverted abasic nucleotide
  misc_feature 1..21: note = source = /note="Description of Artificial Sequence: Synthetic oligonucleotide"
  source 1..21: mol_type = other RNA
ctgcttcatgcctttctacan

SEQ ID NO: 2216 - RNA, 23 nt, synthetic construct
  misc_feature 1..23: note = source = /note="Description of Artificial Sequence: Synthetic oligonucleotide"
  source 1..23: mol_type = other RNA
atgtagaaaggcatgaagcagtt

SEQ ID NO: 2217 - DNA, 21 bp, synthetic construct
  modified_base 21: mod_base = OTHER; note = Inverted abasic nucleotide
  misc_feature 1..21: note = source = /note="Description of Artificial Sequence: Synthetic oligonucleotide"
  misc_feature 1..21: note = source = /note="Description of Combined DNA/RNA Molecule: Synthetic oligonucleotide"
  source 1..21: mol_type = other DNA
ctgcttcatgcctttctacan

SEQ ID NO: 2218 - RNA, 23 nt, synthetic construct
  modified_base 7: mod_base = OTHER; note = Abasic nucleotide
  misc_feature 1..23: note = source = /note="Description of Artificial Sequence: Synthetic oligonucleotide"
  source 1..23: mol_type = other RNA
atgtagnaaggcatgaagcagtt

SEQ ID NO: 2219 - DNA, 21 bp, synthetic construct
  modified_base 21: mod_base = OTHER; note = Inverted abasic nucleotide
  misc_feature 1..21: note = source = /note="Description of Artificial Sequence: Synthetic oligonucleotide"
  misc_feature 1..21: note = source = /note="Description of Combined DNA/RNA Molecule: Synthetic oligonucleotide"
  source 1..21: mol_type = other DNA
ctgcttcatgcctttctacan

SEQ ID NO: 2220 - RNA, 23 nt, synthetic construct
  modified_base 5: mod_base = OTHER; note = Abasic nucleotide
  misc_feature 1..23: note = source = /note="Description of Artificial Sequence: Synthetic oligonucleotide"
  source 1..23: mol_type = other RNA
atgtngaaaggcatgaagcagtt

SEQ ID NO: 2221 - RNA, 21 nt, synthetic construct
  modified_base 21: mod_base = OTHER; note = Inverted abasic nucleotide
  misc_feature 1..21: note = source = /note="Description of Artificial Sequence: Synthetic oligonucleotide"
  source 1..21: mol_type = other RNA
ctgcttcatgcctttctacan

SEQ ID NO: 2222 - RNA, 23 nt, synthetic construct
  modified_base 4: mod_base = OTHER; note = Abasic nucleotide
  misc_feature 1..23: note = source = /note="Description of Artificial Sequence: Synthetic oligonucleotide"
  source 1..23: mol_type = other RNA
atgnagaaaggcatgaagcagtt

SEQ ID NO: 2223 - RNA, 21 nt, synthetic construct
  modified_base 21: mod_base = OTHER; note = Inverted abasic nucleotide
  misc_feature 1..21: note = source = /note="Description of Artificial Sequence: Synthetic oligonucleotide"
  source 1..21: mol_type = other RNA
ctgcttcatgcctttctacan

SEQ ID NO: 2224 - RNA, 23 nt, synthetic construct
  misc_feature 1..23: note = source = /note="Description of Artificial Sequence: Synthetic oligonucleotide"
  source 1..23: mol_type = other RNA
atgtagaaaggcatgaagcagtt

SEQ ID NO: 2225 - RNA, 21 nt, synthetic construct
  modified_base 21: mod_base = OTHER; note = Inverted abasic nucleotide
  misc_feature 1..21: note = source = /note="Description of Artificial Sequence: Synthetic oligonucleotide"
  source 1..21: mol_type = other RNA
ctgcttcatgcctttctacan

SEQ ID NO: 2226 - RNA, 23 nt, synthetic construct
  misc_feature 1..23: note = source = /note="Description of Artificial Sequence: Synthetic oligonucleotide"
  source 1..23: mol_type = other RNA
atgtagaaaggcatgaagcagtt

SEQ ID NO: 2227 - DNA, 21 bp, synthetic construct
  modified_base 21: mod_base = OTHER; note = Inverted abasic nucleotide
  misc_feature 1..21: note = source = /note="Description of Artificial Sequence: Synthetic oligonucleotide"
  misc_feature 1..21: note = source = /note="Description of Combined DNA/RNA Molecule: Synthetic oligonucleotide"
  source 1..21: mol_type = other DNA
ctgcttcatgcctttctacan

SEQ ID NO: 2228 - RNA, 23 nt, synthetic construct
  misc_feature 1..23: note = source = /note="Description of Artificial Sequence: Synthetic oligonucleotide"
  source 1..23: mol_type = other RNA
atgtagaaaggcatgaagcagtt

SEQ ID NO: 2229 - DNA, 21 bp, synthetic construct
  modified_base 21: mod_base = OTHER; note = Inverted abasic nucleotide
  misc_feature 1..21: note = source = /note="Description of Artificial Sequence: Synthetic oligonucleotide"
  misc_feature 1..21: note = source = /note="Description of Combined DNA/RNA Molecule: Synthetic oligonucleotide"
  source 1..21: mol_type = other DNA
ctgcttcatgcctttctacan

SEQ ID NO: 2230 - RNA, 23 nt, synthetic construct
  misc_feature 1..23: note = source = /note="Description of Artificial Sequence: Synthetic oligonucleotide"
  source 1..23: mol_type = other RNA
atgtagaaaggcatgaagcagtt

SEQ ID NO: 2231 - DNA, 21 bp, synthetic construct
  modified_base 21: mod_base = OTHER; note = Inverted abasic nucleotide
  misc_feature 1..21: note = source = /note="Description of Artificial Sequence: Synthetic oligonucleotide"
  misc_feature 1..21: note = source = /note="Description of Combined DNA/RNA Molecule: Synthetic oligonucleotide"
  source 1..21: mol_type = other DNA
ctgcttcatgcctttctacan

SEQ ID NO: 2232 - RNA, 23 nt, synthetic construct
  misc_feature 1..23: note = source = /note="Description of Artificial Sequence: Synthetic oligonucleotide"
  source 1..23: mol_type = other RNA
atgtagaaaggcatgaagcagtt

SEQ ID NO: 2233 - DNA, 21 bp, synthetic construct
  modified_base 21: mod_base = OTHER; note = Inverted abasic nucleotide
  misc_feature 1..21: note = source = /note="Description of Artificial Sequence: Synthetic oligonucleotide"
  misc_feature 1..21: note = source = /note="Description of Combined DNA/RNA Molecule: Synthetic oligonucleotide"
  source 1..21: mol_type = other DNA
ctgcttcatgcctttctacan

SEQ ID NO: 2234 - RNA, 23 nt, synthetic construct
  misc_feature 1..23: note = source = /note="Description of Artificial Sequence: Synthetic oligonucleotide"
  source 1..23: mol_type = other RNA
atgtagaaaggcatgaagcagtt

SEQ ID NO: 2235 - DNA, 21 bp, synthetic construct
  misc_feature 1..21: note = source = /note="Description of Artificial Sequence: Synthetic oligonucleotide"
  misc_feature 1..21: note = source = /note="Description of Combined DNA/RNA Molecule: Synthetic oligonucleotide"
  source 1..21: mol_type = other DNA
tgcttcatgcctttctacaga

SEQ ID NO: 2236 - RNA, 23 nt, synthetic construct
  modified_base 5: mod_base = OTHER; note = Abasic nucleotide
  misc_feature 1..23: note = source = /note="Description of Artificial Sequence: Synthetic oligonucleotide"
  source 1..23: mol_type = other RNA
tctgnagaaaggcatgaagcatt

SEQ ID NO: 2237 - DNA, 21 bp, synthetic construct
  misc_feature 1..21: note = source = /note="Description of Artificial Sequence: Synthetic oligonucleotide"
  misc_feature 1..21: note = source = /note="Description of Combined DNA/RNA Molecule: Synthetic oligonucleotide"
  source 1..21: mol_type = other DNA
tgcttcatgcctttctacaga

SEQ ID NO: 2238 - RNA, 23 nt, synthetic construct
  modified_base 6: mod_base = OTHER; note = Abasic nucleotide
  misc_feature 1..23: note = source = /note="Description of Artificial Sequence: Synthetic oligonucleotide"
  source 1..23: mol_type = other RNA
tctgtngaaaggcatgaagcatt

SEQ ID NO: 2239 - DNA, 21 bp, synthetic construct
  misc_feature 1..21: note = source = /note="Description of Artificial Sequence: Synthetic oligonucleotide"
  misc_feature 1..21: note = source = /note="Description of Combined DNA/RNA Molecule: Synthetic oligonucleotide"
  source 1..21: mol_type = other DNA
tgcttcatgcctttctacaga

SEQ ID NO: 2240 - RNA, 23 nt, synthetic construct
  modified_base 8: mod_base = OTHER; note = Abasic nucleotide
  misc_feature 1..23: note = source = /note="Description of Artificial Sequence: Synthetic oligonucleotide"
  source 1..23: mol_type = other RNA
tctgtagnaaggcatgaagcatt

SEQ ID NO: 2241 - DNA, 21 bp, synthetic construct
  misc_feature 1..21: note = source = /note="Description of Artificial Sequence: Synthetic oligonucleotide"
  misc_feature 1..21: note = source = /note="Description of Combined DNA/RNA Molecule: Synthetic oligonucleotide"
  source 1..21: mol_type = other DNA
tgcttcatgcctttctacaga

SEQ ID NO: 2242 - RNA, 23 nt, synthetic construct
  misc_feature 1..23: note = source = /note="Description of Artificial Sequence: Synthetic oligonucleotide"
  source 1..23: mol_type = other RNA
tctgtagaaaggcatgaagcatt

SEQ ID NO: 2243 - DNA, 21 bp, synthetic construct
  misc_feature 1..21: note = source = /note="Description of Artificial Sequence: Synthetic oligonucleotide"
  misc_feature 1..21: note = source = /note="Description of Combined DNA/RNA Molecule: Synthetic oligonucleotide"
  source 1..21: mol_type = other DNA
tgcttcatgcctttctacaga

SEQ ID NO: 2244 - RNA, 23 nt, synthetic construct
  misc_feature 1..23: note = source = /note="Description of Artificial Sequence: Synthetic oligonucleotide"
  source 1..23: mol_type = other RNA
tctgtagaaaggcatgaagcatt

SEQ ID NO: 2245 - DNA, 21 bp, synthetic construct
  misc_feature 1..21: note = source = /note="Description of Artificial Sequence: Synthetic oligonucleotide"
  misc_feature 1..21: note = source = /note="Description of Combined DNA/RNA Molecule: Synthetic oligonucleotide"
  source 1..21: mol_type = other DNA
tgcttcatgcctttctacaga

SEQ ID NO: 2246 - RNA, 23 nt, synthetic construct
  misc_feature 1..23: note = source = /note="Description of Artificial Sequence: Synthetic oligonucleotide"
  source 1..23: mol_type = other RNA
tctgtagaaaggcatgaagcatt

SEQ ID NO: 2247 - DNA, 21 bp, synthetic construct
  misc_feature 1..21: note = source = /note="Description of Artificial Sequence: Synthetic oligonucleotide"
  misc_feature 1..21: note = source = /note="Description of Combined DNA/RNA Molecule: Synthetic oligonucleotide"
  source 1..21: mol_type = other DNA
tgcttcatgcctttctacaga

SEQ ID NO: 2248 - RNA, 23 nt, synthetic construct
  modified_base 2: mod_base = OTHER; note = Abasic nucleotide
  misc_feature 1..23: note = source = /note="Description of Artificial Sequence: Synthetic oligonucleotide"
  source 1..23: mol_type = other RNA
tntgtagaaaggcatgaagcatt

SEQ ID NO: 2249 - DNA, 21 bp, synthetic construct
  misc_feature 1..21: note = source = /note="Description of Artificial Sequence: Synthetic oligonucleotide"
  misc_feature 1..21: note = source = /note="Description of Combined DNA/RNA Molecule: Synthetic oligonucleotide"
  source 1..21: mol_type = other DNA
tgcttcatgcctttctacaga

SEQ ID NO: 2250 - RNA, 23 nt, synthetic construct
  modified_base 3: mod_base = OTHER; note = Abasic nucleotide
  misc_feature 1..23: note = source = /note="Description of Artificial Sequence: Synthetic oligonucleotide"
  source 1..23: mol_type = other RNA
tcngtagaaaggcatgaagcatt

SEQ ID NO: 2251 - RNA, 21 nt, synthetic construct
  modified_base 21: mod_base = OTHER; note = Inverted abasic nucleotide
  misc_feature 1..21: note = source = /note="Description of Artificial Sequence: Synthetic oligonucleotide"
  source 1..21: mol_type = other RNA
tcatgcctttctacagtggcn

SEQ ID NO: 2252 - RNA, 23 nt, synthetic construct
  modified_base 6: mod_base = OTHER; note = Abasic nucleotide
  misc_feature 1..23: note = source = /note="Description of Artificial Sequence: Synthetic oligonucleotide"
  source 1..23: mol_type = other RNA
agccantgtagaaaggcatgatt

SEQ ID NO: 2253 - DNA, 21 bp, synthetic construct
  modified_base 21: mod_base = OTHER; note = Inverted abasic nucleotide
  misc_feature 1..21: note = source = /note="Description of Artificial Sequence: Synthetic oligonucleotide"
  misc_feature 1..21: note = source = /note="Description of Combined DNA/RNA Molecule: Synthetic oligonucleotide"
  source 1..21: mol_type = other DNA
tcatgcctttctacagtggcn

SEQ ID NO: 2254 - RNA, 23 nt, synthetic construct
  modified_base 6: mod_base = OTHER; note = Abasic nucleotide
  misc_feature 1..23: note = source = /note="Description of Artificial Sequence: Synthetic oligonucleotide"
  source 1..23: mol_type = other RNA
agccantgtagaaaggcatgatt

SEQ ID NO: 2255 - RNA, 21 nt, synthetic construct
  modified_base 21: mod_base = OTHER; note = Inverted abasic nucleotide
  misc_feature 1..21: note = source = /note="Description of Artificial Sequence: Synthetic oligonucleotide"
  source 1..21: mol_type = other RNA
tcatgcctttctacagtggcn

SEQ ID NO: 2256 - RNA, 23 nt, synthetic construct
  modified_base 6: mod_base = OTHER; note = Abasic nucleotide
  misc_feature 1..23: note = source = /note="Description of Artificial Sequence: Synthetic oligonucleotide"
  source 1..23: mol_type = other RNA
agccantgtagaaaggcatgatt

SEQ ID NO: 2257 - RNA, 21 nt, synthetic construct
  misc_feature 1..21: note = source = /note="Description of Artificial Sequence: Synthetic oligonucleotide"
  source 1..21: mol_type = other RNA
ggtatgttcctgcttcatttt

SEQ ID NO: 2258 - RNA, 21 nt, synthetic construct
  misc_feature 1..21: note = source = /note="Description of Artificial Sequence: Synthetic oligonucleotide"
  source 1..21: mol_type = other RNA
aatgaagcaggaacatacctt

SEQ ID NO: 2259 - RNA, 21 nt, synthetic construct
  misc_feature 1..21: note = source = /note="Description of Artificial Sequence: Synthetic oligonucleotide"
  source 1..21: mol_type = other RNA
ggtatgttcctgcttcatatt

SEQ ID NO: 2260 - RNA, 21 nt, synthetic construct
  misc_feature 1..21: note = source = /note="Description of Artificial Sequence: Synthetic oligonucleotide"
  source 1..21: mol_type = other RNA
tatgaagcaggaacatacctt

SEQ ID NO: 2261 - RNA, 21 nt, synthetic construct
  misc_feature 1..21: note = source = /note="Description of Artificial Sequence: Synthetic oligonucleotide"
  source 1..21: mol_type = other RNA
gtatgttcctgcttcatgttt

SEQ ID NO: 2262 - RNA, 21 nt, synthetic construct
  misc_feature 1..21: note = source = /note="Description of Artificial Sequence: Synthetic oligonucleotide"
  source 1..21: mol_type = other RNA
acatgaagcaggaacatactt

SEQ ID NO: 2263 - RNA, 21 nt, synthetic construct
  misc_feature 1..21: note = source = /note="Description of Artificial Sequence: Synthetic oligonucleotide"
  source 1..21: mol_type = other RNA
tatgttcctgcttcatgcatt

SEQ ID NO: 2264 - RNA, 21 nt, synthetic construct
  misc_feature 1..21: note = source = /note="Description of Artificial Sequence: Synthetic oligonucleotide"
  source 1..21: mol_type = other RNA
tgcatgaagcaggaacatatt

SEQ ID NO: 2265 - RNA, 21 nt, synthetic construct
  misc_feature 1..21: note = source = /note="Description of Artificial Sequence: Synthetic oligonucleotide"
  source 1..21: mol_type = other RNA
atgttcctgcttcatgccttt

SEQ ID NO: 2266 - RNA, 21 nt, synthetic construct
  misc_feature 1..21: note = source = /note="Description of Artificial Sequence: Synthetic oligonucleotide"
  source 1..21: mol_type = other RNA
aggcatgaagcaggaacattt

SEQ ID NO: 2267 - RNA, 21 nt, synthetic construct
  misc_feature 1..21: note = source = /note="Description of Artificial Sequence: Synthetic oligonucleotide"
  source 1..21: mol_type = other RNA
tgttcctgcttcatgcctttt

SEQ ID NO: 2268 - RNA, 21 nt, synthetic construct
  misc_feature 1..21: note = source = /note="Description of Artificial Sequence: Synthetic oligonucleotide"
  source 1..21: mol_type = other RNA
aaggcatgaagcaggaacatt

SEQ ID NO: 2269 - RNA, 21 nt, synthetic construct
  misc_feature 1..21: note = source = /note="Description of Artificial Sequence: Synthetic oligonucleotide"
  source 1..21: mol_type = other RNA
gttcctgcttcatgccttttt

SEQ ID NO: 2270 - RNA, 21 nt, synthetic construct
  misc_feature 1..21: note = source = /note="Description of Artificial Sequence: Synthetic oligonucleotide"
  source 1..21: mol_type = other RNA
aaaggcatgaagcaggaactt

SEQ ID NO: 2271 - RNA, 21 nt, synthetic construct
  misc_feature 1..21: note = source = /note="Description of Artificial Sequence: Synthetic oligonucleotide"
  source 1..21: mol_type = other RNA
ttcctgcttcatgcctttttt

SEQ ID NO: 2272 - RNA, 21 nt, synthetic construct
  misc_feature 1..21: note = source = /note="Description of Artificial Sequence: Synthetic oligonucleotide"
  source 1..21: mol_type = other RNA
aaaaggcatgaagcaggaatt

SEQ ID NO: 2273 - RNA, 21 nt, synthetic construct
  misc_feature 1..21: note = source = /note="Description of Artificial Sequence: Synthetic oligonucleotide"
  source 1..21: mol_type = other RNA
ttcctgcttcatgcctttatt

SEQ ID NO: 2274 - RNA, 21 nt, synthetic construct
  misc_feature 1..21: note = source = /note="Description of Artificial Sequence: Synthetic oligonucleotide"
  source 1..21: mol_type = other RNA
taaaggcatgaagcaggaatt

SEQ ID NO: 2275 - RNA, 21 nt, synthetic construct
  misc_feature 1..21: note = source = /note="Description of Artificial Sequence: Synthetic oligonucleotide"
  source 1..21: mol_type = other RNA
tcctgcttcatgcctttcttt

SEQ ID NO: 2276 - RNA, 21 nt, synthetic construct
  misc_feature 1..21: note = source = /note="Description of Artificial Sequence: Synthetic oligonucleotide"
  source 1..21: mol_type = other RNA
agaaaggcatgaagcaggatt

SEQ ID NO: 2277 - RNA, 21 nt, synthetic construct
  misc_feature 1..21: note = source = /note="Description of Artificial Sequence: Synthetic oligonucleotide"
  source 1..21: mol_type = other RNA
cctgcttcatgcctttctatt

SEQ ID NO: 2278 - RNA, 21 nt, synthetic construct
  misc_feature 1..21: note = source = /note="Description of Artificial Sequence: Synthetic oligonucleotide"
  source 1..21: mol_type = other RNA
tagaaaggcatgaagcaggtt

SEQ ID NO: 2279 - RNA, 21 nt, synthetic construct
  misc_feature 1..21: note = source = /note="Description of Artificial Sequence: Synthetic oligonucleotide"
  source 1..21: mol_type = other RNA
ctgcttcatgcctttctattt

SEQ ID NO: 2280 - RNA, 21 nt, synthetic construct
  misc_feature 1..21: note = source = /note="Description of Artificial Sequence: Synthetic oligonucleotide"
  source 1..21: mol_type = other RNA
atagaaaggcatgaagcagtt

SEQ ID NO: 2281 - RNA, 21 nt, synthetic construct
  misc_feature 1..21: note = source = /note="Description of Artificial Sequence: Synthetic oligonucleotide"
  source 1..21: mol_type = other RNA
ctgcttcatgcctttctaatt

SEQ ID NO: 2282 - RNA, 21 nt, synthetic construct
  misc_feature 1..21: note = source = /note="Description of Artificial Sequence: Synthetic oligonucleotide"
  source 1..21: mol_type = other RNA
ttagaaaggcatgaagcagtt

SEQ ID NO: 2283 - RNA, 21 nt, synthetic construct
  misc_feature 1..21: note = source = /note="Description of Artificial Sequence: Synthetic oligonucleotide"
  source 1..21: mol_type = other RNA
tgcttcatgcctttctacatt

SEQ ID NO: 2284 - RNA, 21 nt, synthetic construct
  misc_feature 1..21: note = source = /note="Description of Artificial Sequence: Synthetic oligonucleotide"
  source 1..21: mol_type = other RNA
tgtagaaaggcatgaagcatt

SEQ ID NO: 2285 - RNA, 21 nt, synthetic construct
  misc_feature 1..21: note = source = /note="Description of Artificial Sequence: Synthetic oligonucleotide"
  source 1..21: mol_type = other RNA
gcttcatgcctttctacattt

SEQ ID NO: 2286 - RNA, 21 nt, synthetic construct
  misc_feature 1..21: note = source = /note="Description of Artificial Sequence: Synthetic oligonucleotide"
  source 1..21: mol_type = other RNA
atgtagaaaggcatgaagctt

SEQ ID NO: 2287 - RNA, 21 nt, synthetic construct
  misc_feature 1..21: note = source = /note="Description of Artificial Sequence: Synthetic oligonucleotide"
  source 1..21: mol_type = other RNA
gcttcatgcctttctacaatt

SEQ ID NO: 2288 - RNA, 21 nt, synthetic construct
  misc_feature 1..21: note = source = /note="Description of Artificial Sequence: Synthetic oligonucleotide"
  source 1..21: mol_type = other RNA
ttgtagaaaggcatgaagctt

SEQ ID NO: 2289 - RNA, 21 nt, synthetic construct
  misc_feature 1..21: note = source = /note="Description of Artificial Sequence: Synthetic oligonucleotide"
  source 1..21: mol_type = other RNA
cttcatgcctttctacagttt

SEQ ID NO: 2290 - RNA, 21 nt, synthetic construct
  misc_feature 1..21: note = source = /note="Description of Artificial Sequence: Synthetic oligonucleotide"
  source 1..21: mol_type = other RNA
actgtagaaaggcatgaagtt

SEQ ID NO: 2291 - RNA, 21 nt, synthetic construct
  misc_feature 1..21: note = source = /note="Description of Artificial Sequence: Synthetic oligonucleotide"
  source 1..21: mol_type = other RNA
ttcatgcctttctacagtttt

SEQ ID NO: 2292 - RNA, 21 nt, synthetic construct
  misc_feature 1..21: note = source = /note="Description of Artificial Sequence: Synthetic oligonucleotide"
  source 1..21: mol_type = other RNA
aactgtagaaaggcatgaatt

SEQ ID NO: 2293 - RNA, 21 nt, synthetic construct
  misc_feature 1..21: note = source = /note="Description of Artificial Sequence: Synthetic oligonucleotide"
  source 1..21: mol_type = other RNA
ttcatgcctttctacagtatt

SEQ ID NO: 2294 - RNA, 21 nt, synthetic construct
  misc_feature 1..21: note = source = /note="Description of Artificial Sequence: Synthetic oligonucleotide"
  source 1..21: mol_type = other RNA
tactgtagaaaggcatgaatt

SEQ ID NO: 2295 - RNA, 21 nt, synthetic construct
  misc_feature 1..21: note = source = /note="Description of Artificial Sequence: Synthetic oligonucleotide"
  source 1..21: mol_type = other RNA
tcatgcctttctacagtgttt

SEQ ID NO: 2296 - RNA, 21 nt, synthetic construct
  misc_feature 1..21: note = source = /note="Description of Artificial Sequence: Synthetic oligonucleotide"
  source 1..21: mol_type = other RNA
acactgtagaaaggcatgatt

SEQ ID NO: 2297 - RNA, 21 nt, synthetic construct
  misc_feature 1..21: note = source = /note="Description of Artificial Sequence: Synthetic oligonucleotide"
  source 1..21: mol_type = other RNA
tcatgcctttctacagtgatt

SEQ ID NO: 2298 - RNA, 21 nt, synthetic construct
  misc_feature 1..21: note = source = /note="Description of Artificial Sequence: Synthetic oligonucleotide"
  source 1..21: mol_type = other RNA
tcactgtagaaaggcatgatt

SEQ ID NO: 2299 - RNA, 21 nt, synthetic construct
  misc_feature 1..21: note = source = /note="Description of Artificial Sequence: Synthetic oligonucleotide"
  source 1..21: mol_type = other RNA
catgcctttctacagtggttt

SEQ ID NO: 2300 - RNA, 21 nt, synthetic construct
  misc_feature 1..21: note = source = /note="Description of Artificial Sequence: Synthetic oligonucleotide"
  source 1..21: mol_type = other RNA
accactgtagaaaggcatgtt

SEQ ID NO: 2301 - RNA, 21 nt, synthetic construct
  misc_feature 1..21: note = source = /note="Description of Artificial Sequence: Synthetic oligonucleotide"
  source 1..21: mol_type = other RNA
catgcctttctacagtggatt

SEQ ID NO: 2302 - RNA, 21 nt, synthetic construct
  misc_feature 1..21: note = source = /note="Description of Artificial Sequence: Synthetic oligonucleotide"
  source 1..21: mol_type = other RNA
tccactgtagaaaggcatgtt

SEQ ID NO: 2303 - RNA, 21 nt, synthetic construct
  misc_feature 1..21: note = source = /note="Description of Artificial Sequence: Synthetic oligonucleotide"
  source 1..21: mol_type = other RNA
atgcctttctacagtggcttt

SEQ ID NO: 2304 - RNA, 21 nt, synthetic construct
  misc_feature 1..21: note = source = /note="Description of Artificial Sequence: Synthetic oligonucleotide"
  source 1..21: mol_type = other RNA
agccactgtagaaaggcattt

SEQ ID NO: 2305 - RNA, 21 nt, synthetic construct
  misc_feature 1..21: note = source = /note="Description of Artificial Sequence: Synthetic oligonucleotide"
  source 1..21: mol_type = other RNA
atgcctttctacagtggcatt

SEQ ID NO: 2306 - RNA, 21 nt, synthetic construct
  misc_feature 1..21: note = source = /note="Description of Artificial Sequence: Synthetic oligonucleotide"
  source 1..21: mol_type = other RNA
tgccactgtagaaaggcattt

SEQ ID NO: 2307 - RNA, 21 nt, synthetic construct
  misc_feature 1..21: note = source = /note="Description of Artificial Sequence: Synthetic oligonucleotide"
  source 1..21: mol_type = other RNA
tgcctttctacagtggccttt

SEQ ID NO: 2308 - RNA, 21 nt, synthetic construct
  misc_feature 1..21: note = source = /note="Description of Artificial Sequence: Synthetic oligonucleotide"
  source 1..21: mol_type = other RNA
aggccactgtagaaaggcatt

SEQ ID NO: 2309 - RNA, 21 nt, synthetic construct
  misc_feature 1..21: note = source = /note="Description of Artificial Sequence: Synthetic oligonucleotide"
  source 1..21: mol_type = other RNA
gcctttctacagtggcctttt

SEQ ID NO: 2310 - RNA, 21 nt, synthetic construct
  misc_feature 1..21: note = source = /note="Description of Artificial Sequence: Synthetic oligonucleotide"
  source 1..21: mol_type = other RNA
aaggccactgtagaaaggctt

SEQ ID NO: 2311 - RNA, 21 nt, synthetic construct
  misc_feature 1..21: note = source = /note="Description of Artificial Sequence: Synthetic oligonucleotide"
  source 1..21: mol_type = other RNA
ggtatgttcctgcttcatctt

SEQ ID NO: 2312 - RNA, 21 nt, synthetic construct
  misc_feature 1..21: note = source = /note="Description of Artificial Sequence: Synthetic oligonucleotide"
  source 1..21: mol_type = other RNA
gatgaagcaggaacatacctt

SEQ ID NO: 2313 - RNA, 21 nt, synthetic construct
  misc_feature 1..21: note = source = /note="Description of Artificial Sequence: Synthetic oligonucleotide"
  source 1..21: mol_type = other RNA
gtatgttcctgcttcatcctt

SEQ ID NO: 2314 - RNA, 21 nt, synthetic construct
  misc_feature 1..21: note = source = /note="Description of Artificial Sequence: Synthetic oligonucleotide"
  source 1..21: mol_type = other RNA
ggatgaagcaggaacatactt

SEQ ID NO: 2315 - RNA, 21 nt, synthetic construct
  misc_feature 1..21: note = source = /note="Description of Artificial Sequence: Synthetic oligonucleotide"
  source 1..21: mol_type = other RNA
tatgttcctgcttcatccctt

SEQ ID NO: 2316 - RNA, 21 nt, synthetic construct
  misc_feature 1..21: note = source = /note="Description of Artificial Sequence: Synthetic oligonucleotide"
  source 1..21: mol_type = other RNA
gggatgaagcaggaacatatt

SEQ ID NO: 2317 - RNA, 21 nt, synthetic construct
  misc_feature 1..21: note = source = /note="Description of Artificial Sequence: Synthetic oligonucleotide"
  source 1..21: mol_type = other RNA
atgttcctgcttcatcccctt

SEQ ID NO: 2318 - RNA, 21 nt, synthetic construct
  misc_feature 1..21: note = source = /note="Description of Artificial Sequence: Synthetic oligonucleotide"
  source 1..21: mol_type = other RNA
ggggatgaagcaggaacattt

SEQ ID NO: 2319 - RNA, 21 nt, synthetic construct
  misc_feature 1..21: note = source = /note="Description of Artificial Sequence: Synthetic oligonucleotide"
  source 1..21: mol_type = other RNA
tgttcctgcttcatccccttt

SEQ ID NO: 2320 - RNA, 21 nt, synthetic construct
  misc_feature 1..21: note = source = /note="Description of Artificial Sequence: Synthetic oligonucleotide"
  source 1..21: mol_type = other RNA
aggggatgaagcaggaacatt

SEQ ID NO: 2321 - RNA, 21 nt, synthetic construct
  misc_feature 1..21: note = source = /note="Description of Artificial Sequence: Synthetic oligonucleotide"
  source 1..21: mol_type = other RNA
gttcctgcttcatcccctttt

SEQ ID NO: 2322 - RNA, 21 nt, synthetic construct
  misc_feature 1..21: note = source = /note="Description of Artificial Sequence: Synthetic oligonucleotide"
  source 1..21: mol_type = other RNA
aaggggatgaagcaggaactt

SEQ ID NO: 2323 - RNA, 21 nt, synthetic construct
  misc_feature 1..21: note = source = /note="Description of Artificial Sequence: Synthetic oligonucleotide"
  source 1..21: mol_type = other RNA
ttcctgcttcatccccttctt

SEQ ID NO: 2324 - RNA, 21 nt, synthetic construct
  misc_feature 1..21: note = source = /note="Description of Artificial Sequence: Synthetic oligonucleotide"
  source 1..21: mol_type = other RNA
gaaggggatgaagcaggaatt

SEQ ID NO: 2325 - RNA, 21 nt, synthetic construct
  misc_feature 1..21: note = source = /note="Description of Artificial Sequence: Synthetic oligonucleotide"
  source 1..21: mol_type = other RNA
tcctgcttcatccccttcttt

SEQ ID NO: 2326 - RNA, 21 nt, synthetic construct
  misc_feature 1..21: note = source = /note="Description of Artificial Sequence: Synthetic oligonucleotide"
  source 1..21: mol_type = other RNA
agaaggggatgaagcaggatt

SEQ ID NO: 2327 - RNA, 21 nt, synthetic construct
  misc_feature 1..21: note = source = /note="Description of Artificial Sequence: Synthetic oligonucleotide"
  source 1..21: mol_type = other RNA
cctgcttcatccccttctatt

SEQ ID NO: 2328 - RNA, 21 nt, synthetic construct
  misc_feature 1..21: note = source = /note="Description of Artificial Sequence: Synthetic oligonucleotide"
  source 1..21: mol_type = other RNA
tagaaggggatgaagcaggtt

SEQ ID NO: 2329 - RNA, 21 nt, synthetic construct
  misc_feature 1..21: note = source = /note="Description of Artificial Sequence: Synthetic oligonucleotide"
  source 1..21: mol_type = other RNA
ctgcttcatccccttctactt

SEQ ID NO: 2330 - RNA, 21 nt, synthetic construct
  misc_feature 1..21: note = source = /note="Description of Artificial Sequence: Synthetic oligonucleotide"
  source 1..21: mol_type = other RNA
gtagaaggggatgaagcagtt

SEQ ID NO: 2331 - RNA, 21 nt, synthetic construct
  misc_feature 1..21: note = source = /note="Description of Artificial Sequence: Synthetic oligonucleotide"
  source 1..21: mol_type = other RNA
tgcttcatccccttctacatt

SEQ ID NO: 2332 - RNA, 21 nt, synthetic construct
  misc_feature 1..21: note = source = /note="Description of Artificial Sequence: Synthetic oligonucleotide"
  source 1..21: mol_type = other RNA
tgtagaaggggatgaagcatt

SEQ ID NO: 2333 - RNA, 21 nt, synthetic construct
  misc_feature 1..21: note = source = /note="Description of Artificial Sequence: Synthetic oligonucleotide"
  source 1..21: mol_type = other RNA
gcttcatccccttctacagtt

SEQ ID NO: 2334 - RNA, 21 nt, synthetic construct
  misc_feature 1..21: note = source = /note="Description of Artificial Sequence: Synthetic oligonucleotide"
  source 1..21: mol_type = other RNA
ctgtagaaggggatgaagctt

SEQ ID NO: 2335 - RNA, 21 nt, synthetic construct
  misc_feature 1..21: note = source = /note="Description of Artificial Sequence: Synthetic oligonucleotide"
  source 1..21: mol_type = other RNA
cttcatccccttctacagttt

SEQ ID NO: 2336 - RNA, 21 nt, synthetic construct
  misc_feature 1..21: note = source = /note="Description of Artificial Sequence: Synthetic oligonucleotide"
  source 1..21: mol_type = other RNA
actgtagaaggggatgaagtt

SEQ ID NO: 2337 - RNA, 21 nt, synthetic construct
  misc_feature 1..21: note = source = /note="Description of Artificial Sequence: Synthetic oligonucleotide"
  source 1..21: mol_type = other RNA
ttcatccccttctacagtgtt

SEQ ID NO: 2338 - RNA, 21 nt, synthetic construct
  misc_feature 1..21: note = source = /note="Description of Artificial Sequence: Synthetic oligonucleotide"
  source 1..21: mol_type = other RNA
cactgtagaaggggatgaatt

SEQ ID NO: 2339 - RNA, 21 nt, synthetic construct
  misc_feature 1..21: note = source = /note="Description of Artificial Sequence: Synthetic oligonucleotide"
  source 1..21: mol_type = other RNA
tcatccccttctacagtggtt

SEQ ID NO: 2340 - RNA, 21 nt, synthetic construct
  misc_feature 1..21: note = source = /note="Description of Artificial Sequence: Synthetic oligonucleotide"
  source 1..21: mol_type = other RNA
ccactgtagaaggggatgatt

SEQ ID NO: 2341 - RNA, 21 nt, synthetic construct
  misc_feature 1..21: note = source = /note="Description of Artificial Sequence: Synthetic oligonucleotide"
  source 1..21: mol_type = other RNA
catccccttctacagtggctt

SEQ ID NO: 2342 - RNA, 21 nt, synthetic construct
  misc_feature 1..21: note = source = /note="Description of Artificial Sequence: Synthetic oligonucleotide"
  source 1..21: mol_type = other RNA
gccactgtagaaggggatgtt

SEQ ID NO: 2343 - RNA, 21 nt, synthetic construct
  misc_feature 1..21: note = source = /note="Description of Artificial Sequence: Synthetic oligonucleotide"
  source 1..21: mol_type = other RNA
atccccttctacagtggcctt

SEQ ID NO: 2344 - RNA, 21 nt, synthetic construct
  misc_feature 1..21: note = source = /note="Description of Artificial Sequence: Synthetic oligonucleotide"
  source 1..21: mol_type = other RNA
ggccactgtagaaggggattt

SEQ ID NO: 2345 - RNA, 21 nt, synthetic construct
  misc_feature 1..21: note = source = /note="Description of Artificial Sequence: Synthetic oligonucleotide"
  source 1..21: mol_type = other RNA
tccccttctacagtggccttt

SEQ ID NO: 2346 - RNA, 21 nt, synthetic construct
  misc_feature 1..21: note = source = /note="Description of Artificial Sequence: Synthetic oligonucleotide"
  source 1..21: mol_type = other RNA
aggccactgtagaaggggatt

SEQ ID NO: 2347 - RNA, 21 nt, synthetic construct
  misc_feature 1..21: note = source = /note="Description of Artificial Sequence: Synthetic oligonucleotide"
  source 1..21: mol_type = other RNA
ccccttctacagtggcctttt

SEQ ID NO: 2348 - RNA, 21 nt, synthetic construct
  misc_feature 1..21: note = source = /note="Description of Artificial Sequence: Synthetic oligonucleotide"
  source 1..21: mol_type = other RNA
aaggccactgtagaaggggtt

SEQ ID NO: 2349 - RNA, 21 nt, synthetic construct
  misc_feature 1..21: note = source = /note="Description of Artificial Sequence: Synthetic oligonucleotide"
  source 1..21: mol_type = other RNA
ggtatgttcctgcttcatttt

SEQ ID NO: 2350 - RNA, 21 nt, synthetic construct
  misc_feature 1..21: note = source = /note="Description of Artificial Sequence: Synthetic oligonucleotide"
  source 1..21: mol_type = other RNA
aatgaagcaggaacatacctt

SEQ ID NO: 2351 - RNA, 21 nt, synthetic construct
  misc_feature 1..21: note = source = /note="Description of Artificial Sequence: Synthetic oligonucleotide"
  source 1..21: mol_type = other RNA
ggtatgttcctgcttcatatt

SEQ ID NO: 2352 - RNA, 21 nt, synthetic construct
  misc_feature 1..21: note = source = /note="Description of Artificial Sequence: Synthetic oligonucleotide"
  source 1..21: mol_type = other RNA
tatgaagcaggaacatacctt

SEQ ID NO: 2353 - RNA, 21 nt, synthetic construct
  misc_feature 1..21: note = source = /note="Description of Artificial Sequence: Synthetic oligonucleotide"
  source 1..21: mol_type = other RNA
gtatgttcctgcttcatgttt

SEQ ID NO: 2354 - RNA, 21 nt, synthetic construct
  misc_feature 1..21: note = source = /note="Description of Artificial Sequence: Synthetic oligonucleotide"
  source 1..21: mol_type = other RNA
acatgaagcaggaacatactt

SEQ ID NO: 2355 - RNA, 21 nt, synthetic construct
  misc_feature 1..21: note = source = /note="Description of Artificial Sequence: Synthetic oligonucleotide"
  source 1..21: mol_type = other RNA
tatgttcctgcttcatgcatt

SEQ ID NO: 2356 - RNA, 21 nt, synthetic construct
  misc_feature 1..21: note = source = /note="Description of Artificial Sequence: Synthetic oligonucleotide"
  source 1..21: mol_type = other RNA
tgcatgaagcaggaacatatt

SEQ ID NO: 2357 - RNA, 21 nt, synthetic construct
  misc_feature 1..21: note = source = /note="Description of Artificial Sequence: Synthetic oligonucleotide"
  source 1..21: mol_type = other RNA
atgttcctgcttcatgccttt

SEQ ID NO: 2358 - RNA, 21 nt, synthetic construct
  misc_feature 1..21: note = source = /note="Description of Artificial Sequence: Synthetic oligonucleotide"
  source 1..21: mol_type = other RNA
aggcatgaagcaggaacattt

SEQ ID NO: 2359 - RNA, 21 nt, synthetic construct
  misc_feature 1..21: note = source = /note="Description of Artificial Sequence: Synthetic oligonucleotide"
  source 1..21: mol_type = other RNA
tgttcctgcttcatgcctttt

SEQ ID NO: 2360 - RNA, 21 nt, synthetic construct
  misc_feature 1..21: note = source = /note="Description of Artificial Sequence: Synthetic oligonucleotide"
  source 1..21: mol_type = other RNA
aaggcatgaagcaggaacatt

SEQ ID NO: 2361 - RNA, 21 nt, synthetic construct
  misc_feature 1..21: note = source = /note="Description of Artificial Sequence: Synthetic oligonucleotide"
  source 1..21: mol_type = other RNA
gttcctgcttcatgccttttt

SEQ ID NO: 2362 - RNA, 21 nt, synthetic construct
  misc_feature 1..21: note = source = /note="Description of Artificial Sequence: Synthetic oligonucleotide"
  source 1..21: mol_type = other RNA
aaaggcatgaagcaggaactt

SEQ ID NO: 2363 - RNA, 21 nt, synthetic construct
  misc_feature 1..21: note = source = /note="Description of Artificial Sequence: Synthetic oligonucleotide"
  source 1..21: mol_type = other RNA
ttcctgcttcatgcctttttt

SEQ ID NO: 2364 - RNA, 21 nt, synthetic construct
  misc_feature 1..21: note = source = /note="Description of Artificial Sequence: Synthetic oligonucleotide"
  source 1..21: mol_type = other RNA
aaaaggcatgaagcaggaatt

SEQ ID NO: 2365 - RNA, 21 nt, synthetic construct
  misc_feature 1..21: note = source = /note="Description of Artificial Sequence: Synthetic oligonucleotide"
  source 1..21: mol_type = other RNA
ttcctgcttcatgcctttatt

SEQ ID NO: 2366 - RNA, 21 nt, synthetic construct
  misc_feature 1..21: note = source = /note="Description of Artificial Sequence: Synthetic oligonucleotide"
  source 1..21: mol_type = other RNA
taaaggcatgaagcaggaatt

SEQ ID NO: 2367 - RNA, 21 nt, synthetic construct
  misc_feature 1..21: note = source = /note="Description of Artificial Sequence: Synthetic oligonucleotide"
  source 1..21: mol_type = other RNA
tcctgcttcatgcctttcttt

SEQ ID NO: 2368 - RNA, 21 nt, synthetic construct
  misc_feature 1..21: note = source = /note="Description of Artificial Sequence: Synthetic oligonucleotide"
  source 1..21: mol_type = other RNA
agaaaggcatgaagcaggatt

SEQ ID NO: 2369 - RNA, 21 nt, synthetic construct
  misc_feature 1..21: note = source = /note="Description of Artificial Sequence: Synthetic oligonucleotide"
  source 1..21: mol_type = other RNA
cctgcttcatgcctttctatt

SEQ ID NO: 2370 - RNA, 21 nt, synthetic construct
  misc_feature 1..21: note = source = /note="Description of Artificial Sequence: Synthetic oligonucleotide"
  source 1..21: mol_type = other RNA
tagaaaggcatgaagcaggtt

SEQ ID NO: 2371 - RNA, 21 nt, synthetic construct
  misc_feature 1..21: note = source = /note="Description of Artificial Sequence: Synthetic oligonucleotide"
  source 1..21: mol_type = other RNA
ctgcttcatgcctttctattt

SEQ ID NO: 2372 - RNA, 21 nt, synthetic construct
  misc_feature 1..21: note = source = /note="Description of Artificial Sequence: Synthetic oligonucleotide"
  source 1..21: mol_type = other RNA
atagaaaggcatgaagcagtt

SEQ ID NO: 2373 - RNA, 21 nt, synthetic construct
  misc_feature 1..21: note = source = /note="Description of Artificial Sequence: Synthetic oligonucleotide"
  source 1..21: mol_type = other RNA
ctgcttcatgcctttctaatt

SEQ ID NO: 2374 - RNA, 21 nt, synthetic construct
  misc_feature 1..21: note = source = /note="Description of Artificial Sequence: Synthetic oligonucleotide"
  source 1..21: mol_type = other RNA
ttagaaaggcatgaagcagtt

SEQ ID NO: 2375 - RNA, 21 nt, synthetic construct
  misc_feature 1..21: note = source = /note="Description of Artificial Sequence: Synthetic oligonucleotide"
  source 1..21: mol_type = other RNA
tgcttcatgcctttctacatt

SEQ ID NO: 2376 - RNA, 21 nt, synthetic construct
  misc_feature 1..21: note = source = /note="Description of Artificial Sequence: Synthetic oligonucleotide"
  source 1..21: mol_type = other RNA
tgtagaaaggcatgaagcatt

SEQ ID NO: 2377 - RNA, 21 nt, synthetic construct
  misc_feature 1..21: note = source = /note="Description of Artificial Sequence: Synthetic oligonucleotide"
  source 1..21: mol_type = other RNA
gcttcatgcctttctacattt

SEQ ID NO: 2378 - RNA, 21 nt, synthetic construct
  misc_feature 1..21: note = source = /note="Description of Artificial Sequence: Synthetic oligonucleotide"
  source 1..21: mol_type = other RNA
atgtagaaaggcatgaagctt

SEQ ID NO: 2379 - RNA, 21 nt, synthetic construct
  misc_feature 1..21: note = source = /note="Description of Artificial Sequence: Synthetic oligonucleotide"
  source 1..21: mol_type = other RNA
gcttcatgcctttctacaatt

SEQ ID NO: 2380 - RNA, 21 nt, synthetic construct
  misc_feature 1..21: note = source = /note="Description of Artificial Sequence: Synthetic oligonucleotide"
  source 1..21: mol_type = other RNA
ttgtagaaaggcatgaagctt

SEQ ID NO: 2381 - RNA, 21 nt, synthetic construct
  misc_feature 1..21: note = source = /note="Description of Artificial Sequence: Synthetic oligonucleotide"
  source 1..21: mol_type = other RNA
cttcatgcctttctacagttt

SEQ ID NO: 2382 - RNA, 21 nt, synthetic construct
  misc_feature 1..21: note = source = /note="Description of Artificial Sequence: Synthetic oligonucleotide"
  source 1..21: mol_type = other RNA
actgtagaaaggcatgaagtt

SEQ ID NO: 2383 - RNA, 21 nt, synthetic construct
  misc_feature 1..21: note = source = /note="Description of Artificial Sequence: Synthetic oligonucleotide"
  source 1..21: mol_type = other RNA
ttcatgcctttctacagtttt

SEQ ID NO: 2384 - RNA, 21 nt, synthetic construct
  misc_feature 1..21: note = source = /note="Description of Artificial Sequence: Synthetic oligonucleotide"
  source 1..21: mol_type = other RNA
aactgtagaaaggcatgaatt

SEQ ID NO: 2385 - RNA, 21 nt, synthetic construct
  misc_feature 1..21: note = source = /note="Description of Artificial Sequence: Synthetic oligonucleotide"
  source 1..21: mol_type = other RNA
ttcatgcctttctacagtatt

SEQ ID NO: 2386 - RNA, 21 nt, synthetic construct
  misc_feature 1..21: note = source = /note="Description of Artificial Sequence: Synthetic oligonucleotide"
  source 1..21: mol_type = other RNA
tactgtagaaaggcatgaatt

SEQ ID NO: 2387 - RNA, 21 nt, synthetic construct
  misc_feature 1..21: note = source = /note="Description of Artificial Sequence: Synthetic oligonucleotide"
  source 1..21: mol_type = other RNA
tcatgcctttctacagtgttt

SEQ ID NO: 2388 - RNA, 21 nt, synthetic construct
  misc_feature 1..21: note = source = /note="Description of Artificial Sequence: Synthetic oligonucleotide"
  source 1..21: mol_type = other RNA
acactgtagaaaggcatgatt

SEQ ID NO: 2389 - RNA, 21 nt, synthetic construct
  misc_feature 1..21: note = source = /note="Description of Artificial Sequence: Synthetic oligonucleotide"
  source 1..21: mol_type = other RNA
tcatgcctttctacagtgatt

SEQ ID NO: 2390 - RNA, 21 nt, synthetic construct
  misc_feature 1..21: note = source = /note="Description of Artificial Sequence: Synthetic oligonucleotide"
  source 1..21: mol_type = other RNA
tcactgtagaaaggcatgatt

SEQ ID NO: 2391 - RNA, 21 nt, synthetic construct
  misc_feature 1..21: note = source = /note="Description of Artificial Sequence: Synthetic oligonucleotide"
  source 1..21: mol_type = other RNA
catgcctttctacagtggttt

SEQ ID NO: 2392 - RNA, 21 nt, synthetic construct
  misc_feature 1..21: note = source = /note="Description of Artificial Sequence: Synthetic oligonucleotide"
  source 1..21: mol_type = other RNA
accactgtagaaaggcatgtt

SEQ ID NO: 2393 - RNA, 21 nt, synthetic construct
  misc_feature 1..21: note = source = /note="Description of Artificial Sequence: Synthetic oligonucleotide"
  source 1..21: mol_type = other RNA
catgcctttctacagtggatt

SEQ ID NO: 2394 - RNA, 21 nt, synthetic construct
  misc_feature 1..21: note = source = /note="Description of Artificial Sequence: Synthetic oligonucleotide"
  source 1..21: mol_type = other RNA
tccactgtagaaaggcatgtt

SEQ ID NO: 2395 - RNA, 21 nt, synthetic construct
  misc_feature 1..21: note = source = /note="Description of Artificial Sequence: Synthetic oligonucleotide"
  source 1..21: mol_type = other RNA
atgcctttctacagtggcttt

SEQ ID NO: 2396 - RNA, 21 nt, synthetic construct
  misc_feature 1..21: note = source = /note="Description of Artificial Sequence: Synthetic oligonucleotide"
  source 1..21: mol_type = other RNA
agccactgtagaaaggcattt

SEQ ID NO: 2397 - RNA, 21 nt, synthetic construct
  misc_feature 1..21: note = source = /note="Description of Artificial Sequence: Synthetic oligonucleotide"
  source 1..21: mol_type = other RNA
atgcctttctacagtggcatt

SEQ ID NO: 2398 - RNA, 21 nt, synthetic construct
  misc_feature 1..21: note = source = /note="Description of Artificial Sequence: Synthetic oligonucleotide"
  source 1..21: mol_type = other RNA
tgccactgtagaaaggcattt

SEQ ID NO: 2399 - RNA, 21 nt, synthetic construct
  misc_feature 1..21: note = source = /note="Description of Artificial Sequence: Synthetic oligonucleotide"
  source 1..21: mol_type = other RNA
tgcctttctacagtggccttt

SEQ ID NO: 2400 - RNA, 21 nt, synthetic construct
  misc_feature 1..21: note = source = /note="Description of Artificial Sequence: Synthetic oligonucleotide"
  source 1..21: mol_type = other RNA
aggccactgtagaaaggcatt

SEQ ID NO: 2401 - RNA, 21 nt, synthetic construct
  misc_feature 1..21: note = source = /note="Description of Artificial Sequence: Synthetic oligonucleotide"
  source 1..21: mol_type = other RNA
gcctttctacagtggcctttt

SEQ ID NO: 2402 - RNA, 21 nt, synthetic construct
  misc_feature 1..21: note = source = /note="Description of Artificial Sequence: Synthetic oligonucleotide"
  source 1..21: mol_type = other RNA
aaggccactgtagaaaggctt

SEQ ID NO: 2403 - RNA, 21 nt, synthetic construct
  misc_feature 1..21: note = source = /note="Description of Artificial Sequence: Synthetic oligonucleotide"
  source 1..21: mol_type = other RNA
ggtatgttcctgcttcatctt

SEQ ID NO: 2404 - RNA, 21 nt, synthetic construct
  misc_feature 1..21: note = source = /note="Description of Artificial Sequence: Synthetic oligonucleotide"
  source 1..21: mol_type = other RNA
gatgaagcaggaacatacctt

SEQ ID NO: 2405 - RNA, 21 nt, synthetic construct
  misc_feature 1..21: note = source = /note="Description of Artificial Sequence: Synthetic oligonucleotide"
  source 1..21: mol_type = other RNA
gtatgttcctgcttcatcctt

SEQ ID NO: 2406 - RNA, 21 nt, synthetic construct
  misc_feature 1..21: note = source = /note="Description of Artificial Sequence: Synthetic oligonucleotide"
  source 1..21: mol_type = other RNA
ggatgaagcaggaacatactt

SEQ ID NO: 2407 - RNA, 21 nt, synthetic construct
  misc_feature 1..21: note = source = /note="Description of Artificial Sequence: Synthetic oligonucleotide"
  source 1..21: mol_type = other RNA
tatgttcctgcttcatccctt

SEQ ID NO: 2408 - RNA, 21 nt, synthetic construct
  misc_feature 1..21: note = source = /note="Description of Artificial Sequence: Synthetic oligonucleotide"
  source 1..21: mol_type = other RNA
gggatgaagcaggaacatatt

SEQ ID NO: 2409 - RNA, 21 nt, synthetic construct
  misc_feature 1..21: note = source = /note="Description of Artificial Sequence: Synthetic oligonucleotide"
  source 1..21: mol_type = other RNA
atgttcctgcttcatcccctt

SEQ ID NO: 2410 - RNA, 21 nt, synthetic construct
  misc_feature 1..21: note = source = /note="Description of Artificial Sequence: Synthetic oligonucleotide"
  source 1..21: mol_type = other RNA
ggggatgaagcaggaacattt

SEQ ID NO: 2411 - RNA, 21 nt, synthetic construct
  misc_feature 1..21: note = source = /note="Description of Artificial Sequence: Synthetic oligonucleotide"
  source 1..21: mol_type = other RNA
tgttcctgcttcatccccttt

SEQ ID NO: 2412 - RNA, 21 nt, synthetic construct
  misc_feature 1..21: note = source = /note="Description of Artificial Sequence: Synthetic oligonucleotide"
  source 1..21: mol_type = other RNA
aggggatgaagcaggaacatt

SEQ ID NO: 2413 - RNA, 21 nt, synthetic construct
  misc_feature 1..21: note = source = /note="Description of Artificial Sequence: Synthetic oligonucleotide"
  source 1..21: mol_type = other RNA
gttcctgcttcatcccctttt

SEQ ID NO: 2414 - RNA, 21 nt, synthetic construct
  misc_feature 1..21: note = source = /note="Description of Artificial Sequence: Synthetic oligonucleotide"
  source 1..21: mol_type = other RNA
aaggggatgaagcaggaactt

SEQ ID NO: 2415 - RNA, 21 nt, synthetic construct
  misc_feature 1..21: note = source = /note="Description of Artificial Sequence: Synthetic oligonucleotide"
  source 1..21: mol_type = other RNA
ttcctgcttcatccccttctt

SEQ ID NO: 2416 - RNA, 21 nt, synthetic construct
  misc_feature 1..21: note = source = /note="Description of Artificial Sequence: Synthetic oligonucleotide"
  source 1..21: mol_type = other RNA
gaaggggatgaagcaggaatt

SEQ ID NO: 2417 - RNA, 21 nt, synthetic construct
  misc_feature 1..21: note = source = /note="Description of Artificial Sequence: Synthetic oligonucleotide"
  source 1..21: mol_type = other RNA
tcctgcttcatccccttcttt

SEQ ID NO: 2418 - RNA, 21 nt, synthetic construct
  misc_feature 1..21: note = source = /note="Description of Artificial Sequence: Synthetic oligonucleotide"
  source 1..21: mol_type = other RNA
agaaggggatgaagcaggatt

SEQ ID NO: 2419 - RNA, 21 nt, synthetic construct
  misc_feature 1..21: note = source = /note="Description of Artificial Sequence: Synthetic oligonucleotide"
  source 1..21: mol_type = other RNA
cctgcttcatccccttctatt

SEQ ID NO: 2420 - RNA, 21 nt, synthetic construct
  misc_feature 1..21: note = source = /note="Description of Artificial Sequence: Synthetic oligonucleotide"
  source 1..21: mol_type = other RNA
tagaaggggatgaagcaggtt

SEQ ID NO: 2421 - RNA, 21 nt, synthetic construct
  misc_feature 1..21: note = source = /note="Description of Artificial Sequence: Synthetic oligonucleotide"
  source 1..21: mol_type = other RNA
ctgcttcatccccttctactt

SEQ ID NO: 2422 - RNA, 21 nt, synthetic construct
  misc_feature 1..21: note = source = /note="Description of Artificial Sequence: Synthetic oligonucleotide"
  source 1..21: mol_type = other RNA
gtagaaggggatgaagcagtt

SEQ ID NO: 2423 - RNA, 21 nt, synthetic construct
  misc_feature 1..21: note = source = /note="Description of Artificial Sequence: Synthetic oligonucleotide"
  source 1..21: mol_type = other RNA
tgcttcatccccttctacatt

SEQ ID NO: 2424 - RNA, 21 nt, synthetic construct
  misc_feature 1..21: note = source = /note="Description of Artificial Sequence: Synthetic oligonucleotide"
  source 1..21: mol_type = other RNA
tgtagaaggggatgaagcatt

SEQ ID NO: 2425 - RNA, 21 nt, synthetic construct
  misc_feature 1..21: note = source = /note="Description of Artificial Sequence: Synthetic oligonucleotide"
  source 1..21: mol_type = other RNA
gcttcatccccttctacagtt

SEQ ID NO: 2426 - RNA, 21 nt, synthetic construct
  misc_feature 1..21: note = source = /note="Description of Artificial Sequence: Synthetic oligonucleotide"
  source 1..21: mol_type = other RNA
ctgtagaaggggatgaagctt

SEQ ID NO: 2427 - RNA, 21 nt, synthetic construct
  misc_feature 1..21: note = source = /note="Description of Artificial Sequence: Synthetic oligonucleotide"
  source 1..21: mol_type = other RNA
cttcatccccttctacagttt

SEQ ID NO: 2428 - RNA, 21 nt, synthetic construct
  misc_feature 1..21: note = source = /note="Description of Artificial Sequence: Synthetic oligonucleotide"
  source 1..21: mol_type = other RNA
actgtagaaggggatgaagtt

SEQ ID NO: 2429 - RNA, 21 nt, synthetic construct
  misc_feature 1..21: note = source = /note="Description of Artificial Sequence: Synthetic oligonucleotide"
  source 1..21: mol_type = other RNA
ttcatccccttctacagtgtt

SEQ ID NO: 2430 - RNA, 21 nt, synthetic construct
  misc_feature 1..21: note = source = /note="Description of Artificial Sequence: Synthetic oligonucleotide"
  source 1..21: mol_type = other RNA
cactgtagaaggggatgaatt

SEQ ID NO: 2431 - RNA, 21 nt, synthetic construct
  misc_feature 1..21: note = source = /note="Description of Artificial Sequence: Synthetic oligonucleotide"
  source 1..21: mol_type = other RNA
tcatccccttctacagtggtt

SEQ ID NO: 2432 - RNA, 21 nt, synthetic construct
  misc_feature 1..21: note = source = /note="Description of Artificial Sequence: Synthetic oligonucleotide"
  source 1..21: mol_type = other RNA
ccactgtagaaggggatgatt

SEQ ID NO: 2433 - RNA, 21 nt, synthetic construct
  misc_feature 1..21: note = source = /note="Description of Artificial Sequence: Synthetic oligonucleotide"
  source 1..21: mol_type = other RNA
catccccttctacagtggctt

SEQ ID NO: 2434 - RNA, 21 nt, synthetic construct
  misc_feature 1..21: note = source = /note="Description of Artificial Sequence: Synthetic oligonucleotide"
  source 1..21: mol_type = other RNA
gccactgtagaaggggatgtt

SEQ ID NO: 2435 - RNA, 21 nt, synthetic construct
  misc_feature 1..21: note = source = /note="Description of Artificial Sequence: Synthetic oligonucleotide"
  source 1..21: mol_type = other RNA
atccccttctacagtggcctt

SEQ ID NO: 2436 - RNA, 21 nt, synthetic construct
  misc_feature 1..21: note = source = /note="Description of Artificial Sequence: Synthetic oligonucleotide"
  source 1..21: mol_type = other RNA
ggccactgtagaaggggattt

SEQ ID NO: 2437 - RNA, 21 nt, synthetic construct
  misc_feature 1..21: note = source = /note="Description of Artificial Sequence: Synthetic oligonucleotide"
  source 1..21: mol_type = other RNA
tccccttctacagtggccttt

SEQ ID NO: 2438 - RNA, 21 nt, synthetic construct
  misc_feature 1..21: note = source = /note="Description of Artificial Sequence: Synthetic oligonucleotide"
  source 1..21: mol_type = other RNA
aggccactgtagaaggggatt

SEQ ID NO: 2439 - RNA, 21 nt, synthetic construct
  misc_feature 1..21: note = source = /note="Description of Artificial Sequence: Synthetic oligonucleotide"
  source 1..21: mol_type = other RNA
ccccttctacagtggcctttt

SEQ ID NO: 2440 - RNA, 21 nt, synthetic construct
  misc_feature 1..21: note = source = /note="Description of Artificial Sequence: Synthetic oligonucleotide"
  source 1..21: mol_type = other RNA
aaggccactgtagaaggggtt

SEQ ID NO: 2441 - RNA, 21 nt, synthetic construct
  misc_feature 1..21: note = source = /note="Description of Artificial Sequence: Synthetic oligonucleotide"
  source 1..21: mol_type = other RNA
ctgcttcatgcctttctacaa

SEQ ID NO: 2442 - RNA, 23 nt, synthetic construct
  misc_feature 1..23: note = source = /note="Description of Artificial Sequence: Synthetic oligonucleotide"
  source 1..23: mol_type = other RNA
atgtagaaaggcatgaagcagtt

SEQ ID NO: 2443 - RNA, 21 nt, synthetic construct
  misc_feature 1..21: note = source = /note="Description of Artificial Sequence: Synthetic oligonucleotide"
  source 1..21: mol_type = other RNA
ctgcttcatgcctttctacaa

SEQ ID NO: 2444 - RNA, 23 nt, synthetic construct
  misc_feature 1..23: note = source = /note="Description of Artificial Sequence: Synthetic oligonucleotide"
  source 1..23: mol_type = other RNA
atgtagaaaggcatgaagcagtt

SEQ ID NO: 2445 - RNA, 21 nt, synthetic construct
  misc_feature 1..21: note = source = /note="Description of Artificial Sequence: Synthetic oligonucleotide"
  source 1..21: mol_type = other RNA
ctgcttcatgcctttctacaa

SEQ ID NO: 2446 - RNA, 23 nt, synthetic construct
  misc_feature 1..23: note = source = /note="Description of Artificial Sequence: Synthetic oligonucleotide"
  source 1..23: mol_type = other RNA
atgtagaaaggcatgaagcagtt

SEQ ID NO: 2447 - RNA, 21 nt, synthetic construct
  misc_feature 1..21: note = source = /note="Description of Artificial Sequence: Synthetic oligonucleotide"
  source 1..21: mol_type = other RNA
ctgcttcatgcctttctacaa

SEQ ID NO: 2448 - RNA, 23 nt, synthetic construct
  misc_feature 1..23: note = source = /note="Description of Artificial Sequence: Synthetic oligonucleotide"
  source 1..23: mol_type = other RNA
atgtagaaaggcatgaagcagtt

SEQ ID NO: 2449 - RNA, 21 nt, synthetic construct
  misc_feature 1..21: note = source = /note="Description of Artificial Sequence: Synthetic oligonucleotide"
  source 1..21: mol_type = other RNA
ctgcttcatgcctttctacaa

SEQ ID NO: 2450 - RNA, 23 nt, synthetic construct
  misc_feature 1..23: note = source = /note="Description of Artificial Sequence: Synthetic oligonucleotide"
  source 1..23: mol_type = other RNA
atgtagaaaggcatgaagcagtt

SEQ ID NO: 2451 - RNA, 21 nt, synthetic construct
  misc_feature 1..21: note = source = /note="Description of Artificial Sequence: Synthetic oligonucleotide"
  source 1..21: mol_type = other RNA
ctgcttcatgcctttctacaa

SEQ ID NO: 2452 - RNA, 23 nt, synthetic construct
  misc_feature 1..23: note = source = /note="Description of Artificial Sequence: Synthetic oligonucleotide"
  source 1..23: mol_type = other RNA
atgtagaaaggcatgaagcagtt

SEQ ID NO: 2453 - RNA, 21 nt, synthetic construct
  misc_feature 1..21: note = source = /note="Description of Artificial Sequence: Synthetic oligonucleotide"
  source 1..21: mol_type = other RNA
ctgcttcatgcctttctacaa

SEQ ID NO: 2454 - RNA, 23 nt, synthetic construct
  misc_feature 1..23: note = source = /note="Description of Artificial Sequence: Synthetic oligonucleotide"
  source 1..23: mol_type = other RNA
atgtagaaaggcatgaagcagtt

SEQ ID NO: 2455 - RNA, 21 nt, synthetic construct
  misc_feature 1..21: note = source = /note="Description of Artificial Sequence: Synthetic oligonucleotide"
  source 1..21: mol_type = other RNA
ctgcttcatgcctttctacaa

SEQ ID NO: 2456 - RNA, 23 nt, synthetic construct
  misc_feature 1..23: note = source = /note="Description of Artificial Sequence: Synthetic oligonucleotide"
  source 1..23: mol_type = other RNA
atgtagaaaggcatgaagcagtt

SEQ ID NO: 2457 - RNA, 21 nt, synthetic construct
  misc_feature 1..21: note = source = /note="Description of Artificial Sequence: Synthetic oligonucleotide"
  source 1..21: mol_type = other RNA
ctgcttcatgcctttctacaa

SEQ ID NO: 2458 - RNA, 23 nt, synthetic construct
  misc_feature 1..23: note = source = /note="Description of Artificial Sequence: Synthetic oligonucleotide"
  source 1..23: mol_type = other RNA
atgtagaaaggcatgaagcagtt

SEQ ID NO: 2459 - RNA, 21 nt, synthetic construct
  misc_feature 1..21: note = source = /note="Description of Artificial Sequence: Synthetic oligonucleotide"
  source 1..21: mol_type = other RNA
ctgcttcatgcctttctacaa

SEQ ID NO: 2460 - RNA, 23 nt, synthetic construct
  misc_feature 1..23: note = source = /note="Description of Artificial Sequence: Synthetic oligonucleotide"
  source 1..23: mol_type = other RNA
atgtagaaaggcatgaagcagtt

SEQ ID NO: 2461 - RNA, 21 nt, synthetic construct
  misc_feature 1..21: note = source = /note="Description of Artificial Sequence: Synthetic oligonucleotide"
  source 1..21: mol_type = other RNA
ctgcttcatgcctttctacaa

SEQ ID NO: 2462 - RNA, 23 nt, synthetic construct
  misc_feature 1..23: note = source = /note="Description of Artificial Sequence: Synthetic oligonucleotide"
  source 1..23: mol_type = other RNA
atgtagaaaggcatgaagcagtt

SEQ ID NO: 2463 - RNA, 21 nt, synthetic construct
  misc_feature 1..21: note = source = /note="Description of Artificial Sequence: Synthetic oligonucleotide"
  source 1..21: mol_type = other RNA
ctgcttcatgcctttctacaa

SEQ ID NO: 2464 - RNA, 23 nt, synthetic construct
  misc_feature 1..23: note = source = /note="Description of Artificial Sequence: Synthetic oligonucleotide"
  source 1..23: mol_type = other RNA
atgtagaaaggcatgaagcagtt

SEQ ID NO: 2465 - RNA, 21 nt, synthetic construct
  misc_feature 1..21: note = source = /note="Description of Artificial Sequence: Synthetic oligonucleotide"
  source 1..21: mol_type = other RNA
ctgcttcatgcctttctacaa

SEQ ID NO: 2466 - RNA, 23 nt, synthetic construct
  misc_feature 1..23: note = source = /note="Description of Artificial Sequence: Synthetic oligonucleotide"
  source 1..23: mol_type = other RNA
atgtagaaaggcatgaagcagtt

SEQ ID NO: 2467 - RNA, 21 nt, synthetic construct
  misc_feature 1..21: note = source = /note="Description of Artificial Sequence: Synthetic oligonucleotide"
  source 1..21: mol_type = other RNA
ctgcttcatgcctttctacaa

SEQ ID NO: 2468 - RNA, 23 nt, synthetic construct
  misc_feature 1..23: note = source = /note="Description of Artificial Sequence: Synthetic oligonucleotide"
  source 1..23: mol_type = other RNA
atgtagaaaggcatgaagcagtt

SEQ ID NO: 2469 - RNA, 21 nt, synthetic construct
  misc_feature 1..21: note = source = /note="Description of Artificial Sequence: Synthetic oligonucleotide"
  source 1..21: mol_type = other RNA
ctgcttcatgcctttctacaa

SEQ ID NO: 2470 - RNA, 23 nt, synthetic construct
  misc_feature 1..23: note = source = /note="Description of Artificial Sequence: Synthetic oligonucleotide"
  source 1..23: mol_type = other RNA
atgtagaaaggcatgaagcagtt

SEQ ID NO: 2471 - RNA, 21 nt, synthetic construct
  misc_feature 1..21: note = source = /note="Description of Artificial Sequence: Synthetic oligonucleotide"
  source 1..21: mol_type = other RNA
ctgcttcatgcctttctacaa

SEQ ID NO: 2472 - RNA, 23 nt, synthetic construct
  misc_feature 1..23: note = source = /note="Description of Artificial Sequence: Synthetic oligonucleotide"
  source 1..23: mol_type = other RNA
atgtagaaaggcatgaagcagtt

SEQ ID NO: 2473 - RNA, 21 nt, synthetic construct
  misc_feature 1..21: note = source = /note="Description of Artificial Sequence: Synthetic oligonucleotide"
  source 1..21: mol_type = other RNA
ctgcttcatgcctttctacaa

SEQ ID NO: 2474 - RNA, 23 nt, synthetic construct
  misc_feature 1..23: note = source = /note="Description of Artificial Sequence: Synthetic oligonucleotide"
  source 1..23: mol_type = other RNA
atgtagaaaggcatgaagcagtt

SEQ ID NO: 2475 - RNA, 21 nt, synthetic construct
  misc_feature 1..21: note = source = /note="Description of Artificial Sequence: Synthetic oligonucleotide"
  source 1..21: mol_type = other RNA
ctgcttcatgcctttctacaa

SEQ ID NO: 2476 - RNA, 23 nt, synthetic construct
  misc_feature 1..23: note = source = /note="Description of Artificial Sequence: Synthetic oligonucleotide"
  source 1..23: mol_type = other RNA
atgtagaaaggcatgaagcagtt

SEQ ID NO: 2477 - RNA, 21 nt, synthetic construct
  misc_feature 1..21: note = source = /note="Description of Artificial Sequence: Synthetic oligonucleotide"
  source 1..21: mol_type = other RNA
ctgcttcatgcctttctacaa

SEQ ID NO: 2478 - RNA, 23 nt, synthetic construct
  misc_feature 1..23: note = source = /note="Description of Artificial Sequence: Synthetic oligonucleotide"
  source 1..23: mol_type = other RNA
atgtagaaaggcatgaagcagtt

SEQ ID NO: 2479 - RNA, 21 nt, synthetic construct
  misc_feature 1..21: note = source = /note="Description of Artificial Sequence: Synthetic oligonucleotide"
  source 1..21: mol_type = other RNA
ctgcttcatgcctttctacaa

SEQ ID NO: 2480 - RNA, 23 nt, synthetic construct
  misc_feature 1..23: note = source = /note="Description of Artificial Sequence: Synthetic oligonucleotide"
  source 1..23: mol_type = other RNA
atgtagaaaggcatgaagcagtt

SEQ ID NO: 2481 - RNA, 21 nt, synthetic construct
  misc_feature 1..21: note = source = /note="Description of Artificial Sequence: Synthetic oligonucleotide"
  source 1..21: mol_type = other RNA
ctgcttcatgcctttctacaa

SEQ ID NO: 2482 - RNA, 23 nt, synthetic construct
  misc_feature 1..23: note = source = /note="Description of Artificial Sequence: Synthetic oligonucleotide"
  source 1..23: mol_type = other RNA
atgtagaaaggcatgaagcagtt

SEQ ID NO: 2483 - RNA, 21 nt, synthetic construct
  misc_feature 1..21: note = source = /note="Description of Artificial Sequence: Synthetic oligonucleotide"
  source 1..21: mol_type = other RNA
ctgcttcatgcctttctacaa

SEQ ID NO: 2484 - RNA, 23 nt, synthetic construct
  misc_feature 1..23: note = source = /note="Description of Artificial Sequence: Synthetic oligonucleotide"
  source 1..23: mol_type = other RNA
atgtagaaaggcatgaagcagtt

SEQ ID NO: 2485 - RNA, 21 nt, synthetic construct
  misc_feature 1..21: note = source = /note="Description of Artificial Sequence: Synthetic oligonucleotide"
  source 1..21: mol_type = other RNA
ctgcttcatgcctttctacaa

SEQ ID NO: 2486 - RNA, 23 nt, synthetic construct
  misc_feature 1..23: note = source = /note="Description of Artificial Sequence: Synthetic oligonucleotide"
  source 1..23: mol_type = other RNA
atgtagaaaggcatgaagcagtt

SEQ ID NO: 2487 - RNA, 21 nt, synthetic construct
  misc_feature 1..21: note = source = /note="Description of Artificial Sequence: Synthetic oligonucleotide"
  source 1..21: mol_type = other RNA
ctgcttcatgcctttctacaa

SEQ ID NO: 2488 - RNA, 23 nt, synthetic construct
  misc_feature 1..23: note = source = /note="Description of Artificial Sequence: Synthetic oligonucleotide"
  source 1..23: mol_type = other RNA
atgtagaaaggcatgaagcagtt

SEQ ID NO: 2489 - RNA, 21 nt, synthetic construct
  misc_feature 1..21: note = source = /note="Description of Artificial Sequence: Synthetic oligonucleotide"
  source 1..21: mol_type = other RNA
ctgcttcatgcctttctacaa

SEQ ID NO: 2490 - RNA, 23 nt, synthetic construct
  misc_feature 1..23: note = source = /note="Description of Artificial Sequence: Synthetic oligonucleotide"
  source 1..23: mol_type = other RNA
atgtagaaaggcatgaagcagtt

SEQ ID NO: 2491 - RNA, 21 nt, synthetic construct
  misc_feature 1..21: note = source = /note="Description of Artificial Sequence: Synthetic oligonucleotide"
  source 1..21: mol_type = other RNA
ctgcttcatgcctttctacaa

SEQ ID NO: 2492 - RNA, 23 nt, synthetic construct
  misc_feature 1..23: note = source = /note="Description of Artificial Sequence: Synthetic oligonucleotide"
  source 1..23: mol_type = other RNA
atgtagaaaggcatgaagcagtt

SEQ ID NO: 2493 - RNA, 21 nt, synthetic construct
  misc_feature 1..21: note = source = /note="Description of Artificial Sequence: Synthetic oligonucleotide"
  source 1..21: mol_type = other RNA
ctgcttcatgcctttctacaa

SEQ ID NO: 2494 - RNA, 23 nt, synthetic construct
  misc_feature 1..23: note = source = /note="Description of Artificial Sequence: Synthetic oligonucleotide"
  source 1..23: mol_type = other RNA
atgtagaaaggcatgaagcagtt

SEQ ID NO: 2495 - RNA, 21 nt, synthetic construct
  misc_feature 1..21: note = source = /note="Description of Artificial Sequence: Synthetic oligonucleotide"
  source 1..21: mol_type = other RNA
tgcttcatgcctttctacaga

SEQ ID NO: 2496 - RNA, 23 nt, synthetic construct
  misc_feature 1..23: note = source = /note="Description of Artificial Sequence: Synthetic oligonucleotide"
  source 1..23: mol_type = other RNA
tctgtagaaaggcatgaagcatt

SEQ ID NO: 2497 - RNA, 21 nt, synthetic construct
  misc_feature 1..21: note = source = /note="Description of Artificial Sequence: Synthetic oligonucleotide"
  source 1..21: mol_type = other RNA
tgcttcatgcctttctacaga

SEQ ID NO: 2498 - RNA, 23 nt, synthetic construct
  misc_feature 1..23: note = source = /note="Description of Artificial Sequence: Synthetic oligonucleotide"
  source 1..23: mol_type = other RNA
tctgtagaaaggcatgaagcatt

SEQ ID NO: 2499 - RNA, 21 nt, synthetic construct
  misc_feature 1..21: note = source = /note="Description of Artificial Sequence: Synthetic oligonucleotide"
  source 1..21: mol_type = other RNA
tgcttcatgcctttctacaga

SEQ ID NO: 2500 - RNA, 23 nt, synthetic construct
  misc_feature 1..23: note = source = /note="Description of Artificial Sequence: Synthetic oligonucleotide"
  source 1..23: mol_type = other RNA
tctgtagaaaggcatgaagcatt

SEQ ID NO: 2501 - RNA, 21 nt, synthetic construct
  misc_feature 1..21: note = source = /note="Description of Artificial Sequence: Synthetic oligonucleotide"
  source 1..21: mol_type = other RNA
tgcttcatgcctttctacaga

SEQ ID NO: 2502 - RNA, 23 nt, synthetic construct
  misc_feature 1..23: note = source = /note="Description of Artificial Sequence: Synthetic oligonucleotide"
  source 1..23: mol_type = other RNA
tctgtagaaaggcatgaagcatt

SEQ ID NO: 2503 - RNA, 21 nt, synthetic construct
  misc_feature 1..21: note = source = /note="Description of Artificial Sequence: Synthetic oligonucleotide"
  source 1..21: mol_type = other RNA
tgcttcatgcctttctacaga

SEQ ID NO: 2504 - RNA, 23 nt, synthetic construct
  misc_feature 1..23: note = source = /note="Description of Artificial Sequence: Synthetic oligonucleotide"
  source 1..23: mol_type = other RNA
tctgtagaaaggcatgaagcatt

SEQ ID NO: 2505 - RNA, 21 nt, synthetic construct
  misc_feature 1..21: note = source = /note="Description of Artificial Sequence: Synthetic oligonucleotide"
  source 1..21: mol_type = other RNA
tgcttcatgcctttctacaga

SEQ ID NO: 2506 - RNA, 23 nt, synthetic construct
  misc_feature 1..23: note = source = /note="Description of Artificial Sequence: Synthetic oligonucleotide"
  source 1..23: mol_type = other RNA
tatgtagaaaggcatgaagcatt

SEQ ID NO: 2507 - RNA, 21 nt, synthetic construct
  misc_feature 1..21: note = source = /note="Description of Artificial Sequence: Synthetic oligonucleotide"
  source 1..21: mol_type = other RNA
tgcttcatgcctttctacaga

SEQ ID NO: 2508 - RNA, 23 nt, synthetic construct
  misc_feature 1..23: note = source = /note="Description of Artificial Sequence: Synthetic oligonucleotide"
  source 1..23: mol_type = other RNA
tcagtagaaaggcatgaagcatt

SEQ ID NO: 2509 - RNA, 21 nt, synthetic construct
  misc_feature 1..21: note = source = /note="Description of Artificial Sequence: Synthetic oligonucleotide"
  source 1..21: mol_type = other RNA
tgcttcatgcctttctacaga

SEQ ID NO: 2510 - RNA, 23 nt, synthetic construct
  misc_feature 1..23: note = source = /note="Description of Artificial Sequence: Synthetic oligonucleotide"
  source 1..23: mol_type = other RNA
tctatagaaaggcatgaagcatt

SEQ ID NO: 2511 - RNA, 21 nt, synthetic construct
  misc_feature 1..21: note = source = /note="Description of Artificial Sequence: Synthetic oligonucleotide"
  source 1..21: mol_type = other RNA
tgcttcatgcctttctacaga

SEQ ID NO: 2512 - RNA, 23 nt, synthetic construct
  misc_feature 1..23: note = source = /note="Description of Artificial Sequence: Synthetic oligonucleotide"
  source 1..23: mol_type = other RNA
tctgaagaaaggcatgaagcatt

SEQ ID NO: 2513 - RNA, 21 nt, synthetic construct
  misc_feature 1..21: note = source = /note="Description of Artificial Sequence: Synthetic oligonucleotide"
  source 1..21: mol_type = other RNA
tgcttcatgcctttctacaga

SEQ ID NO: 2514 - RNA, 23 nt, synthetic construct
  misc_feature 1..23: note = source = /note="Description of Artificial Sequence: Synthetic oligonucleotide"
  source 1..23: mol_type = other RNA
tctgtagaaaggcatgaagcatt

SEQ ID NO: 2515 - RNA, 21 nt, synthetic construct
  misc_feature 1..21: note = source = /note="Description of Artificial Sequence: Synthetic oligonucleotide"
  source 1..21: mol_type = other RNA
tgcttcatgcctttctacaga

SEQ ID NO: 2516 - RNA, 23 nt, synthetic construct
  misc_feature 1..23: note = source = /note="Description of Artificial Sequence: Synthetic oligonucleotide"
  source 1..23: mol_type = other RNA
tctgtaaaaaggcatgaagcatt

SEQ ID NO: 2517 - RNA, 21 nt, synthetic construct
  misc_feature 1..21: note = source = /note="Description of Artificial Sequence: Synthetic oligonucleotide"
  source 1..21: mol_type = other RNA
tgcttcatgcctttctacaga

SEQ ID NO: 2518 - RNA, 23 nt, synthetic construct
  misc_feature 1..23: note = source = /note="Description of Artificial Sequence: Synthetic oligonucleotide"
  source 1..23: mol_type = other RNA
tctgtagaaaggcatgaagcatt

SEQ ID NO: 2519 - DNA, 21 bp, synthetic construct
  misc_feature 1..21: note = source = /note="Description of Artificial Sequence: Synthetic oligonucleotide"
  misc_feature 1..21: note = source = /note="Description of Combined DNA/RNA Molecule: Synthetic oligonucleotide"
  source 1..21: mol_type = other DNA
tcatgcctttctacagtggct

SEQ ID NO: 2520 - RNA, 23 nt, synthetic construct
  misc_feature 1..23: note = source = /note="Description of Artificial Sequence: Synthetic oligonucleotide"
  source 1..23: mol_type = other RNA
agccactgtagaaaggcatgatt

SEQ ID NO: 2521 - RNA, 21 nt, synthetic construct
  misc_feature 1..21: note = source = /note="Description of Artificial Sequence: Synthetic oligonucleotide"
  source 1..21: mol_type = other RNA
tcatgcctttctacagtggca

SEQ ID NO: 2522 - RNA, 23 nt, synthetic construct
  misc_feature 1..23: note = source = /note="Description of Artificial Sequence: Synthetic oligonucleotide"
  source 1..23: mol_type = other RNA
tgccactgtagaaaggcatgatt

SEQ ID NO: 2523 - RNA, 21 nt, synthetic construct
  misc_feature 1..21: note = source = /note="Description of Artificial Sequence: Synthetic oligonucleotide"
  source 1..21: mol_type = other RNA
tcatgcctttctacagtggca

SEQ ID NO: 2524 - RNA, 23 nt, synthetic construct
  misc_feature 1..23: note = source = /note="Description of Artificial Sequence: Synthetic oligonucleotide"
  source 1..23: mol_type = other RNA
tgccactgtagaaaggcatgatt

SEQ ID NO: 2525 - DNA, 21 bp, synthetic construct
  misc_feature 1..21: note = source = /note="Description of Artificial Sequence: Synthetic oligonucleotide"
  misc_feature 1..21: note = source = /note="Description of Combined DNA/RNA Molecule: Synthetic oligonucleotide"
  source 1..21: mol_type = other DNA
tcctgcttcatgcctttctat

SEQ ID NO: 2526 - RNA, 23 nt, synthetic construct
  misc_feature 1..23: note = source = /note="Description of Artificial Sequence: Synthetic oligonucleotide"
  source 1..23: mol_type = other RNA
atagaaaggcatgaagcaggatt

SEQ ID NO: 2527 - RNA, 21 nt, synthetic construct
  misc_feature 1..21: note = source = /note="Description of Artificial Sequence: Synthetic oligonucleotide"
  source 1..21: mol_type = other RNA
tcctgcttcatgcctttctaa

SEQ ID NO: 2528 - RNA, 23 nt, synthetic construct
  misc_feature 1..23: note = source = /note="Description of Artificial Sequence: Synthetic oligonucleotide"
  source 1..23: mol_type = other RNA
ttagaaaggcatgaagcaggatt

SEQ ID NO: 2529 - RNA, 21 nt, synthetic construct
  misc_feature 1..21: note = source = /note="Description of Artificial Sequence: Synthetic oligonucleotide"
  source 1..21: mol_type = other RNA
tcctgcttcatgcctttctaa

SEQ ID NO: 2530 - RNA, 23 nt, synthetic construct
  misc_feature 1..23: note = source = /note="Description of Artificial Sequence: Synthetic oligonucleotide"
  source 1..23: mol_type = other RNA
ttagaaaggcatgaagcaggatt

SEQ ID NO: 2531 - DNA, 21 bp, synthetic construct
  misc_feature 1..21: note = source = /note="Description of Artificial Sequence: Synthetic oligonucleotide"
  misc_feature 1..21: note = source = /note="Description of Combined DNA/RNA Molecule: Synthetic oligonucleotide"
  source 1..21: mol_type = other DNA
tatgttcctgcttcatgcctt

SEQ ID NO: 2532 - RNA, 23 nt, synthetic construct
  misc_feature 1..23: note = source = /note="Description of Artificial Sequence: Synthetic oligonucleotide"
  source 1..23: mol_type = other RNA
aaggcatgaagcaggaacatatt

SEQ ID NO: 2533 - RNA, 21 nt, synthetic construct
  misc_feature 1..21: note = source = /note="Description of Artificial Sequence: Synthetic oligonucleotide"
  source 1..21: mol_type = other RNA
tatgttcctgcttcatgccta

SEQ ID NO: 2534 - RNA, 23 nt, synthetic construct
  misc_feature 1..23: note = source = /note="Description of Artificial Sequence: Synthetic oligonucleotide"
  source 1..23: mol_type = other RNA
taggcatgaagcaggaacatatt

SEQ ID NO: 2535 - RNA, 21 nt, synthetic construct
  misc_feature 1..21: note = source = /note="Description of Artificial Sequence: Synthetic oligonucleotide"
  source 1..21: mol_type = other RNA
tatgttcctgcttcatgccta

SEQ ID NO: 2536 - RNA, 23 nt, synthetic construct
  misc_feature 1..23: note = source = /note="Description of Artificial Sequence: Synthetic oligonucleotide"
  source 1..23: mol_type = other RNA
taggcatgaagcaggaacatatt

SEQ ID NO: 2537 - RNA, 21 nt, synthetic construct
  misc_feature 1..21: note = source = /note="Description of Artificial Sequence: Synthetic oligonucleotide"
  source 1..21: mol_type = other RNA
tcctgcttcatgcctttctaa

SEQ ID NO: 2538 - RNA, 23 nt, synthetic construct
  misc_feature 1..23: note = source = /note="Description of Artificial Sequence: Synthetic oligonucleotide"
  source 1..23: mol_type = other RNA
atagaaaggcatgaagcaggatt

SEQ ID NO: 2539 - RNA, 21 nt, synthetic construct
  misc_feature 1..21: note = source = /note="Description of Artificial Sequence: Synthetic oligonucleotide"
  source 1..21: mol_type = other RNA
tatgttcctgcttcatgccta

SEQ ID NO: 2540 - RNA, 23 nt, synthetic construct
  misc_feature 1..23: note = source = /note="Description of Artificial Sequence: Synthetic oligonucleotide"
  source 1..23: mol_type = other RNA
aaggcatgaagcaggaacatatt

SEQ ID NO: 2541 - RNA, 21 nt, synthetic construct
  misc_feature 1..21: note = source = /note="Description of Artificial Sequence: Synthetic oligonucleotide"
  source 1..21: mol_type = other RNA
tatgttcctgcttcatgccta

SEQ ID NO: 2542 - RNA, 23 nt, synthetic construct
  misc_feature 1..23: note = source = /note="Description of Artificial Sequence: Synthetic oligonucleotide"
  source 1..23: mol_type = other RNA
aaggcatgaagcaggaacatatt

SEQ ID NO: 2543 - DNA, 21 bp, synthetic construct
  misc_feature 1..21: note = source = /note="Description of Artificial Sequence: Synthetic oligonucleotide"
  misc_feature 1..21: note = source = /note="Description of Combined DNA/RNA Molecule: Synthetic oligonucleotide"
  source 1..21: mol_type = other DNA
tcatgcctttctacagtggct

SEQ ID NO: 2544 - RNA, 23 nt, synthetic construct
  misc_feature 1..23: note = source = /note="Description of Artificial Sequence: Synthetic oligonucleotide"
  source 1..23: mol_type = other RNA
agccactgtagaaaggcatgatt

SEQ ID NO: 2545 - DNA, 21 bp, synthetic construct
  misc_feature 1..21: note = source = /note="Description of Artificial Sequence: Synthetic oligonucleotide"
  misc_feature 1..21: note = source = /note="Description of Combined DNA/RNA Molecule: Synthetic oligonucleotide"
  source 1..21: mol_type = other DNA
tcctgcttcatgcctttctat

SEQ ID NO: 2546 - RNA, 23 nt, synthetic construct
  misc_feature 1..23: note = source = /note="Description of Artificial Sequence: Synthetic oligonucleotide"
  source 1..23: mol_type = other RNA
atagaaaggcatgaagcaggatt

SEQ ID NO: 2547 - RNA, 21 nt, synthetic construct
  misc_feature 1..21: note = source = /note="Description of Artificial Sequence: Synthetic oligonucleotide"
  source 1..21: mol_type = other RNA
tcctgcttcatgcctttctaa

SEQ ID NO: 2548 - RNA, 23 nt, synthetic construct
  misc_feature 1..23: note = source = /note="Description of Artificial Sequence: Synthetic oligonucleotide"
  source 1..23: mol_type = other RNA
ttagaaaggcatgaagcaggatt

SEQ ID NO: 2549 - RNA, 21 nt, synthetic construct
  misc_feature 1..21: note = source = /note="Description of Artificial Sequence: Synthetic oligonucleotide"
  source 1..21: mol_type = other RNA
tatgttcctgcttcatgccta

SEQ ID NO: 2550 - RNA, 23 nt, synthetic construct
  misc_feature 1..23: note = source = /note="Description of Artificial Sequence: Synthetic oligonucleotide"
  source 1..23: mol_type = other RNA
taggcatgaagcaggaacatatt

SEQ ID NO: 2551 - RNA, 21 nt, synthetic construct
  misc_feature 1..21: note = source = /note="Description of Artificial Sequence: Synthetic oligonucleotide"
  source 1..21: mol_type = other RNA
tgcttcatgcctttctacaga

SEQ ID NO: 2552 - RNA, 23 nt, synthetic construct
  misc_feature 1..23: note = source = /note="Description of Artificial Sequence: Synthetic oligonucleotide"
  source 1..23: mol_type = other RNA
tctgtagaaaggcatgaagcatt

SEQ ID NO: 2553 - RNA, 21 nt, synthetic construct
  misc_feature 1..21: note = source = /note="Description of Artificial Sequence: Synthetic oligonucleotide"
  source 1..21: mol_type = other RNA
ctgcttcatgcctttctacaa

SEQ ID NO: 2554 - RNA, 23 nt, synthetic construct
  misc_feature 1..23: note = source = /note="Description of Artificial Sequence: Synthetic oligonucleotide"
  source 1..23: mol_type = other RNA
atgtagaaaggcatgaagcagtt

SEQ ID NO: 2555 - RNA, 21 nt, synthetic construct
  misc_feature 1..21: note = source = /note="Description of Artificial Sequence: Synthetic oligonucleotide"
  source 1..21: mol_type = other RNA
ctgcttcatgcctttctacaa

SEQ ID NO: 2556 - RNA, 23 nt, synthetic construct
  misc_feature 1..23: note = source = /note="Description of Artificial Sequence: Synthetic oligonucleotide"
  source 1..23: mol_type = other RNA
atgtagaaaggcatgaagcagtt

SEQ ID NO: 2557 - RNA, 21 nt, synthetic construct
  misc_feature 1..21: note = source = /note="Description of Artificial Sequence: Synthetic oligonucleotide"
  source 1..21: mol_type = other RNA
ctgcttcatgcctttctacaa

SEQ ID NO: 2558 - RNA, 23 nt, synthetic construct
  misc_feature 1..23: note = source = /note="Description of Artificial Sequence: Synthetic oligonucleotide"
  source 1..23: mol_type = other RNA
atgtagaaaggcatgaagcagtt

SEQ ID NO: 2559 - RNA, 21 nt, synthetic construct
  misc_feature 1..21: note = source = /note="Description of Artificial Sequence: Synthetic oligonucleotide"
  source 1..21: mol_type = other RNA
ctgcttcatgcctttctacaa

SEQ ID NO: 2560 - RNA, 23 nt, synthetic construct
  misc_feature 1..23: note = source = /note="Description of Artificial Sequence: Synthetic oligonucleotide"
  source 1..23: mol_type = other RNA
atgtagaaaggcatgaagcagtt

SEQ ID NO: 2561 - RNA, 21 nt, synthetic construct
  misc_feature 1..21: note = source = /note="Description of Artificial Sequence: Synthetic oligonucleotide"
  source 1..21: mol_type = other RNA
ctgcttcatgcctttctacaa

SEQ ID NO: 2562 - RNA, 23 nt, synthetic construct
  misc_feature 1..23: note = source = /note="Description of Artificial Sequence: Synthetic oligonucleotide"
  source 1..23: mol_type = other RNA
atgtagaaaggcatgaagcagtt

SEQ ID NO: 2563 - RNA, 21 nt, synthetic construct
  misc_feature 1..21: note = source = /note="Description of Artificial Sequence: Synthetic oligonucleotide"
  source 1..21: mol_type = other RNA
ctgcttcatgcctttctacaa

SEQ ID NO: 2564 - RNA, 23 nt, synthetic construct
  misc_feature 1..23: note = source = /note="Description of Artificial Sequence: Synthetic oligonucleotide"
  source 1..23: mol_type = other RNA
atgtagaaaggcatgaagcagtt

SEQ ID NO: 2565 - RNA, 21 nt, synthetic construct
  misc_feature 1..21: note = source = /note="Description of Artificial Sequence: Synthetic oligonucleotide"
  source 1..21: mol_type = other RNA
ctgcttcatgcctttctacaa

SEQ ID NO: 2566 - RNA, 23 nt, synthetic construct
  misc_feature 1..23: note = source = /note="Description of Artificial Sequence: Synthetic oligonucleotide"
  source 1..23: mol_type = other RNA
atgtagaaaggcatgaagcagtt

SEQ ID NO: 2567 - RNA, 21 nt, synthetic construct
  misc_feature 1..21: note = source = /note="Description of Artificial Sequence: Synthetic oligonucleotide"
  source 1..21: mol_type = other RNA
ctgcttcatgcctttctacaa

SEQ ID NO: 2568 - RNA, 23 nt, synthetic construct
  misc_feature 1..23: note = source = /note="Description of Artificial Sequence: Synthetic oligonucleotide"
  source 1..23: mol_type = other RNA
atgtagaaaggcatgaagcagtt

SEQ ID NO: 2569 - RNA, 21 nt, synthetic construct
  misc_feature 1..21: note = source = /note="Description of Artificial Sequence: Synthetic oligonucleotide"
  source 1..21: mol_type = other RNA
ctgcttcatgcctttctacaa

SEQ ID NO: 2570 - RNA, 23 nt, synthetic construct
  misc_feature 1..23: note = source = /note="Description of Artificial Sequence: Synthetic oligonucleotide"
  source 1..23: mol_type = other RNA
atgtagaaaggcatgaagcagtt

SEQ ID NO: 2571 - DNA, 21 bp, synthetic construct
  misc_feature 1..21: note = source = /note="Description of Artificial Sequence: Synthetic oligonucleotide"
  misc_feature 1..21: note = source = /note="Description of Combined DNA/RNA Molecule: Synthetic oligonucleotide"
  source 1..21: mol_type = other DNA
ctgcttcatgcctttctacaa

SEQ ID NO: 2572 - RNA, 23 nt, synthetic construct
  misc_feature 1..23: note = source = /note="Description of Artificial Sequence: Synthetic oligonucleotide"
  source 1..23: mol_type = other RNA
atgtagaaaggcatgaagcagtt

SEQ ID NO: 2573 - DNA, 21 bp, synthetic construct
  misc_feature 1..21: note = source = /note="Description of Artificial Sequence: Synthetic oligonucleotide"
  misc_feature 1..21: note = source = /note="Description of Combined DNA/RNA Molecule: Synthetic oligonucleotide"
  source 1..21: mol_type = other DNA
ctgcttcatgcctttctacaa

SEQ ID NO: 2574 - RNA, 23 nt, synthetic construct
  misc_feature 1..23: note = source = /note="Description of Artificial Sequence: Synthetic oligonucleotide"
  source 1..23: mol_type = other RNA
atgtagaaaggcatgaagcagtt

SEQ ID NO: 2575 - DNA, 21 bp, synthetic construct
  misc_feature 1..21: note = source = /note="Description of Artificial Sequence: Synthetic oligonucleotide"
  misc_feature 1..21: note = source = /note="Description of Combined DNA/RNA Molecule: Synthetic oligonucleotide"
  source 1..21: mol_type = other DNA
ctgcttcatgcctttctacaa

SEQ ID NO: 2576 - RNA, 23 nt, synthetic construct
  misc_feature 1..23: note = source = /note="Description of Artificial Sequence: Synthetic oligonucleotide"
  source 1..23: mol_type = other RNA
atgtagaaaggcatgaagcagtt

SEQ ID NO: 2577 - DNA, 21 bp, synthetic construct
  misc_feature 1..21: note = source = /note="Description of Artificial Sequence: Synthetic oligonucleotide"
  misc_feature 1..21: note = source = /note="Description of Combined DNA/RNA Molecule: Synthetic oligonucleotide"
  source 1..21: mol_type = other DNA
ctgcttcatgcctttctacaa

SEQ ID NO: 2578 - RNA, 23 nt, synthetic construct
  misc_feature 1..23: note = source = /note="Description of Artificial Sequence: Synthetic oligonucleotide"
  source 1..23: mol_type = other RNA
atgtagaaaggcatgaagcagtt

SEQ ID NO: 2579 - RNA, 21 nt, synthetic construct
  misc_feature 1..21: note = source = /note="Description of Artificial Sequence: Synthetic oligonucleotide"
  source 1..21: mol_type = other RNA
ctgcttcatgcctttctacaa

SEQ ID NO: 2580 - RNA, 23 nt, synthetic construct
  misc_feature 1..23: note = source = /note="Description of Artificial Sequence: Synthetic oligonucleotide"
  source 1..23: mol_type = other RNA
atgtagaaaggcatgaagcagtt

SEQ ID NO: 2581 - RNA, 21 nt, synthetic construct
  misc_feature 1..21: note = source = /note="Description of Artificial Sequence: Synthetic oligonucleotide"
  source 1..21: mol_type = other RNA
ctgcttcatgcctttctacaa

SEQ ID NO: 2582 - RNA, 23 nt, synthetic construct
  misc_feature 1..23: note = source = /note="Description of Artificial Sequence: Synthetic oligonucleotide"
  source 1..23: mol_type = other RNA
atgtagaaaggcatgaagcagtt

SEQ ID NO: 2583 - DNA, 21 bp, synthetic construct
  misc_feature 1..21: note = source = /note="Description of Artificial Sequence: Synthetic oligonucleotide"
  misc_feature 1..21: note = source = /note="Description of Combined DNA/RNA Molecule: Synthetic oligonucleotide"
  source 1..21: mol_type = other DNA
ctgcttcatgcctttctacaa

SEQ ID NO: 2584 - RNA, 23 nt, synthetic construct
  misc_feature 1..23: note = source = /note="Description of Artificial Sequence: Synthetic oligonucleotide"
  source 1..23: mol_type = other RNA
atgtagaaaggcatgaagcagtt

SEQ ID NO: 2585 - DNA, 21 bp, synthetic construct
  misc_feature 1..21: note = source = /note="Description of Artificial Sequence: Synthetic oligonucleotide"
  misc_feature 1..21: note = source = /note="Description of Combined DNA/RNA Molecule: Synthetic oligonucleotide"
  source 1..21: mol_type = other DNA
ctgcttcatgcctttctacaa

SEQ ID NO: 2586 - RNA, 23 nt, synthetic construct
  misc_feature 1..23: note = source = /note="Description of Artificial Sequence: Synthetic oligonucleotide"
  source 1..23: mol_type = other RNA
atgtagaaaggcatgaagcagtt

SEQ ID NO: 2587 - RNA, 21 nt, synthetic construct
  misc_feature 1..21: note = source = /note="Description of Artificial Sequence: Synthetic oligonucleotide"
  source 1..21: mol_type = other RNA
ctgcttcatgcctttctacaa

SEQ ID NO: 2588 - RNA, 23 nt, synthetic construct
  misc_feature 1..23: note = source = /note="Description of Artificial Sequence: Synthetic oligonucleotide"
  source 1..23: mol_type = other RNA
atgaagaaaggcatgaagcagtt

SEQ ID NO: 2589 - RNA, 21 nt, synthetic construct
  misc_feature 1..21: note = source = /note="Description of Artificial Sequence: Synthetic oligonucleotide"
  source 1..21: mol_type = other RNA
ctgcttcatgcctttctacaa

SEQ ID NO: 2590 - RNA, 23 nt, synthetic construct
  misc_feature 1..23: note = source = /note="Description of Artificial Sequence: Synthetic oligonucleotide"
  source 1..23: mol_type = other RNA
atgtagaaaggcatgaagcagtt

SEQ ID NO: 2591 - RNA, 21 nt, synthetic construct
  misc_feature 1..21: note = source = /note="Description of Artificial Sequence: Synthetic oligonucleotide"
  source 1..21: mol_type = other RNA
ctgcttcatgcctttctacaa

SEQ ID NO: 2592 - RNA, 23 nt, synthetic construct
  misc_feature 1..23: note = source = /note="Description of Artificial Sequence: Synthetic oligonucleotide"
  source 1..23: mol_type = other RNA
atgtagaaaggcatgaagcagtt

SEQ ID NO: 2593 - DNA, 21 bp, synthetic construct
  misc_feature 1..21: note = source = /note="Description of Artificial Sequence: Synthetic oligonucleotide"
  misc_feature 1..21: note = source = /note="Description of Combined DNA/RNA Molecule: Synthetic oligonucleotide"
  source 1..21: mol_type = other DNA
ctgcttcatgcctttctacaa

SEQ ID NO: 2594 - RNA, 23 nt, synthetic construct
  misc_feature 1..23: note = source = /note="Description of Artificial Sequence: Synthetic oligonucleotide"
  source 1..23: mol_type = other RNA
atgtagaaaggcatgaagcagtt

SEQ ID NO: 2595 - DNA, 21 bp, synthetic construct
  misc_feature 1..21: note = source = /note="Description of Artificial Sequence: Synthetic oligonucleotide"
  misc_feature 1..21: note = source = /note="Description of Combined DNA/RNA Molecule: Synthetic oligonucleotide"
  source 1..21: mol_type = other DNA
ctgcttcatgcctttctacaa

SEQ ID NO: 2596 - RNA, 23 nt, synthetic construct
  misc_feature 1..23: note = source = /note="Description of Artificial Sequence: Synthetic oligonucleotide"
  source 1..23: mol_type = other RNA
atgtagaaaggcatgaagcagtt

SEQ ID NO: 2597 - DNA, 21 bp, synthetic construct
  misc_feature 1..21: note = source = /note="Description of Artificial Sequence: Synthetic oligonucleotide"
  misc_feature 1..21: note = source = /note="Description of Combined DNA/RNA Molecule: Synthetic oligonucleotide"
  source 1..21: mol_type = other DNA
ctgcttcatgcctttctacaa

SEQ ID NO: 2598 - RNA, 23 nt, synthetic construct
  misc_feature 1..23: note = source = /note="Description of Artificial Sequence: Synthetic oligonucleotide"
  source 1..23: mol_type = other RNA
atgtagaaaggcatgaagcagtt

SEQ ID NO: 2599 - DNA, 21 bp, synthetic construct
  misc_feature 1..21: note = source = /note="Description of Artificial Sequence: Synthetic oligonucleotide"
  misc_feature 1..21: note = source = /note="Description of Combined DNA/RNA Molecule: Synthetic oligonucleotide"
  source 1..21: mol_type = other DNA
ctgcttcatgcctttctacaa

SEQ ID NO: 2600 - RNA, 23 nt, synthetic construct
  misc_feature 1..23: note = source = /note="Description of Artificial Sequence: Synthetic oligonucleotide"
  source 1..23: mol_type = other RNA
atgtagaaaggcatgaagcagtt

SEQ ID NO: 2601 - RNA, 21 nt, synthetic construct
  misc_feature 1..21: note = source = /note="Description of Artificial Sequence: Synthetic oligonucleotide"
  source 1..21: mol_type = other RNA
tgcttcatgcctttctacaga

SEQ ID NO: 2602 - RNA, 23 nt, synthetic construct
  misc_feature 1..23: note = source = /note="Description of Artificial Sequence: Synthetic oligonucleotide"
  source 1..23: mol_type = other RNA
tctgaagaaaggcatgaagcatt

SEQ ID NO: 2603 - DNA, 21 bp, synthetic construct
  misc_feature 1..21: note = source = /note="Description of Artificial Sequence: Synthetic oligonucleotide"
  misc_feature 1..21: note = source = /note="Description of Combined DNA/RNA Molecule: Synthetic oligonucleotide"
  source 1..21: mol_type = other DNA
tgcttcatgcctttctacaga

SEQ ID NO: 2604 - RNA, 23 nt, synthetic construct
  misc_feature 1..23: note = source = /note="Description of Artificial Sequence: Synthetic oligonucleotide"
  source 1..23: mol_type = other RNA
tctgtagaaaggcatgaagcatt

SEQ ID NO: 2605 - DNA, 21 bp, synthetic construct
  misc_feature 1..21: note = source = /note="Description of Artificial Sequence: Synthetic oligonucleotide"
  misc_feature 1..21: note = source = /note="Description of Combined DNA/RNA Molecule: Synthetic oligonucleotide"
  source 1..21: mol_type = other DNA
tgcttcatgcctttctacaga

SEQ ID NO: 2606 - RNA, 23 nt, synthetic construct
  misc_feature 1..23: note = source = /note="Description of Artificial Sequence: Synthetic oligonucleotide"
  source 1..23: mol_type = other RNA
tctgtagaaaggcatgaagcatt

SEQ ID NO: 2607 - RNA, 21 nt, synthetic construct
  misc_feature 1..21: note = source = /note="Description of Artificial Sequence: Synthetic oligonucleotide"
  source 1..21: mol_type = other RNA
tgcttcatgcctttctacaga

SEQ ID NO: 2608 - RNA, 23 nt, synthetic construct
  misc_feature 1..23: note = source = /note="Description of Artificial Sequence: Synthetic oligonucleotide"
  source 1..23: mol_type = other RNA
tctgtagaaaggcatgaagcatt

SEQ ID NO: 2609 - RNA, 21 nt, synthetic construct
  misc_feature 1..21: note = source = /note="Description of Artificial Sequence: Synthetic oligonucleotide"
  source 1..21: mol_type = other RNA
tgcttcatgcctttctacaga

SEQ ID NO: 2610 - RNA, 23 nt, synthetic construct
  misc_feature 1..23: note = source = /note="Description of Artificial Sequence: Synthetic oligonucleotide"
  source 1..23: mol_type = other RNA
tctgtagaaaggcatgaagcatt

SEQ ID NO: 2611 - DNA, 21 bp, synthetic construct
  misc_feature 1..21: note = source = /note="Description of Artificial Sequence: Synthetic oligonucleotide"
  misc_feature 1..21: note = source = /note="Description of Combined DNA/RNA Molecule: Synthetic oligonucleotide"
  source 1..21: mol_type = other DNA
tgcttcatgcctttctacaga

SEQ ID NO: 2612 - RNA, 23 nt, synthetic construct
  misc_feature 1..23: note = source = /note="Description of Artificial Sequence: Synthetic oligonucleotide"
  source 1..23: mol_type = other RNA
tctgtagaaaggcatgaagcatt

SEQ ID NO: 2613 - RNA, 21 nt, synthetic construct
  misc_feature 1..21: note = source = /note="Description of Artificial Sequence: Synthetic oligonucleotide"
  source 1..21: mol_type = other RNA
tgcttcatgcctttctacaga

SEQ ID NO: 2614 - RNA, 23 nt, synthetic construct
  misc_feature 1..23: note = source = /note="Description of Artificial Sequence: Synthetic oligonucleotide"
  source 1..23: mol_type = other RNA
tatgtagaaaggcatgaagcatt

SEQ ID NO: 2615 - RNA, 21 nt, synthetic construct
  misc_feature 1..21: note = source = /note="Description of Artificial Sequence: Synthetic oligonucleotide"
  source 1..21: mol_type = other RNA
tgcttcatgcctttctacaga

SEQ ID NO: 2616 - RNA, 23 nt, synthetic construct
  misc_feature 1..23: note = source = /note="Description of Artificial Sequence: Synthetic oligonucleotide"
  source 1..23: mol_type = other RNA
tcagtagaaaggcatgaagcatt

SEQ ID NO: 2617 - RNA, 21 nt, synthetic construct
  misc_feature 1..21: note = source = /note="Description of Artificial Sequence: Synthetic oligonucleotide"
  source 1..21: mol_type = other RNA
tcatgcctttctacagtggca

SEQ ID NO: 2618 - RNA, 23 nt, synthetic construct
  misc_feature 1..23: note = source = /note="Description of Artificial Sequence: Synthetic oligonucleotide"
  source 1..23: mol_type = other RNA
agccaatgtagaaaggcatgatt

SEQ ID NO: 2619 - DNA, 21 bp, synthetic construct
  misc_feature 1..21: note = source = /note="Description of Artificial Sequence: Synthetic oligonucleotide"
  misc_feature 1..21: note = source = /note="Description of Combined DNA/RNA Molecule: Synthetic oligonucleotide"
  source 1..21: mol_type = other DNA
tcatgcctttctacagtggca

SEQ ID NO: 2620 - RNA, 23 nt, synthetic construct
  misc_feature 1..23: note = source = /note="Description of Artificial Sequence: Synthetic oligonucleotide"
  source 1..23: mol_type = other RNA
agccaatgtagaaaggcatgatt

SEQ ID NO: 2621 - RNA, 21 nt, synthetic construct
  misc_feature 1..21: note = source = /note="Description of Artificial Sequence: Synthetic oligonucleotide"
  source 1..21: mol_type = other RNA
tcatgcctttctacagtggca

SEQ ID NO: 2622 - RNA, 23 nt, synthetic construct
  misc_feature 1..23: note = source = /note="Description of Artificial Sequence: Synthetic oligonucleotide"
  source 1..23: mol_type = other RNA
agccaatgtagaaaggcatgatt

SEQ ID NO: 2623 - RNA, 21 nt, synthetic construct
  misc_feature 1..21: note = source = /note="Description of Artificial Sequence: Synthetic oligonucleotide"
  source 1..21: mol_type = other RNA
ctgcttcatgcctttctacaa

SEQ ID NO: 2624 - RNA, 23 nt, synthetic construct
  misc_feature 1..23: note = source = /note="Description of Artificial Sequence: Synthetic oligonucleotide"
  source 1..23: mol_type = other RNA
atgtagaaaggcatgaagcagtt

SEQ ID NO: 2625 - RNA, 21 nt, synthetic construct
  misc_feature 1..21: note = source = /note="Description of Artificial Sequence: Synthetic oligonucleotide"
  source 1..21: mol_type = other RNA
ctgcttcatgcctttctacaa

SEQ ID NO: 2626 - RNA, 23 nt, synthetic construct
  misc_feature 1..23: note = source = /note="Description of Artificial Sequence: Synthetic oligonucleotide"
  source 1..23: mol_type = other RNA
atatagaaaggcatgaagcagtt

SEQ ID NO: 2627 - RNA, 21 nt, synthetic construct
  misc_feature 1..21: note = source = /note="Description of Artificial Sequence: Synthetic oligonucleotide"
  source 1..21: mol_type = other RNA
tgcttcatgcctttctacaga

SEQ ID NO: 2628 - RNA, 23 nt, synthetic construct
  misc_feature 1..23: note = source = /note="Description of Artificial Sequence: Synthetic oligonucleotide"
  source 1..23: mol_type = other RNA
tctatagaaaggcatgaagcatt

SEQ ID NO: 2629 - RNA, 21 nt, synthetic construct
  misc_feature 1..21: note = source = /note="Description of Artificial Sequence: Synthetic oligonucleotide"
  source 1..21: mol_type = other RNA
tgcttcatgcctttctacaga

SEQ ID NO: 2630 - RNA, 23 nt, synthetic construct
  misc_feature 1..23: note = source = /note="Description of Artificial Sequence: Synthetic oligonucleotide"
  source 1..23: mol_type = other RNA
tctgtagaaaggcatgaagcatt

SEQ ID NO: 2631 - RNA, 21 nt, synthetic construct
  misc_feature 1..21: note = source = /note="Description of Artificial Sequence: Synthetic oligonucleotide"
  source 1..21: mol_type = other RNA
tcatgcctttctacagtggca

SEQ ID NO: 2632 - RNA, 23 nt, synthetic construct
  misc_feature 1..23: note = source = /note="Description of Artificial Sequence: Synthetic oligonucleotide"
  source 1..23: mol_type = other RNA
agccaatgtagaaaggcatgatt

SEQ ID NO: 2633 - RNA, 21 nt, synthetic construct
  misc_feature 1..21: note = source = /note="Description of Artificial Sequence: Synthetic oligonucleotide"
  source 1..21: mol_type = other RNA
tcatgcctttctacagtggca

SEQ ID NO: 2634 - RNA, 23 nt, synthetic construct
  misc_feature 1..23: note = source = /note="Description of Artificial Sequence: Synthetic oligonucleotide"
  source 1..23: mol_type = other RNA
agccaatgtagaaaggcatgatt

SEQ ID NO: 2635 - RNA, 21 nt, synthetic construct
  misc_feature 1..21: note = source = /note="Description of Artificial Sequence: Synthetic oligonucleotide"
  source 1..21: mol_type = other RNA
tcatgcctttctacagtggca

SEQ ID NO: 2636 - RNA, 23 nt, synthetic construct
  misc_feature 1..23: note = source = /note="Description of Artificial Sequence: Synthetic oligonucleotide"
  source 1..23: mol_type = other RNA
agccaatgtagaaaggcatgatt

SEQ ID NO: 2637 - RNA, 21 nt, synthetic construct
  misc_feature 1..21: note = source = /note="Description of Artificial Sequence: Synthetic oligonucleotide"
  source 1..21: mol_type = other RNA
tcatgcctttctacagtggca

SEQ ID NO: 2638 - RNA, 23 nt, synthetic construct
  misc_feature 1..23: note = source = /note="Description of Artificial Sequence: Synthetic oligonucleotide"
  source 1..23: mol_type = other RNA
agccaatgtagaaaggcatgatt

SEQ ID NO: 2639 - RNA, 21 nt, synthetic construct
  misc_feature 1..21: note = source = /note="Description of Artificial Sequence: Synthetic oligonucleotide"
  source 1..21: mol_type = other RNA
ctgcttcatgcctttctacaa

SEQ ID NO: 2640 - RNA, 23 nt, synthetic construct
  modified_base 2: mod_base = OTHER; note = Inosine
  misc_feature 1..23: note = source = /note="Description of Artificial Sequence: Synthetic oligonucleotide"
  source 1..23: mol_type = other RNA
angtagaaaggcatgaagcagtt

SEQ ID NO: 2641 - RNA, 21 nt, synthetic construct
  misc_feature 1..21: note = source = /note="Description of Artificial Sequence: Synthetic oligonucleotide"
  source 1..21: mol_type = other RNA
ctgcttcatgcctttctacaa

SEQ ID NO: 2642 - RNA, 23 nt, synthetic construct
  modified_base 4: mod_base = OTHER; note = Inosine
  misc_feature 1..23: note = source = /note="Description of Artificial Sequence: Synthetic oligonucleotide"
  source 1..23: mol_type = other RNA
atgnagaaaggcatgaagcagtt

SEQ ID NO: 2643 - RNA, 21 nt, synthetic construct
  misc_feature 1..21: note = source = /note="Description of Artificial Sequence: Synthetic oligonucleotide"
  source 1..21: mol_type = other RNA
ctgcttcatgcctttctacaa

SEQ ID NO: 2644 - RNA, 23 nt, synthetic construct
  modified_base 5: mod_base = OTHER; note = Inosine
  misc_feature 1..23: note = source = /note="Description of Artificial Sequence: Synthetic oligonucleotide"
  source 1..23: mol_type = other RNA
atgtngaaaggcatgaagcagtt

SEQ ID NO: 2645 - RNA, 21 nt, synthetic construct
  misc_feature 1..21: note = source = /note="Description of Artificial Sequence: Synthetic oligonucleotide"
  source 1..21: mol_type = other RNA
ctgcttcatgcctttctacaa

SEQ ID NO: 2646 - RNA, 23 nt, synthetic construct
  modified_base 6: mod_base = OTHER; note = Inosine
  misc_feature 1..23: note = source = /note="Description of Artificial Sequence: Synthetic oligonucleotide"
  source 1..23: mol_type = other RNA
atgtanaaaggcatgaagcagtt

SEQ ID NO: 2647 - RNA, 21 nt, synthetic construct
  misc_feature 1..21: note = source = /note="Description of Artificial Sequence: Synthetic oligonucleotide"
  source 1..21: mol_type = other RNA
ctgcttcatgcctttctacaa

SEQ ID NO: 2648 - RNA, 23 nt, synthetic construct
  modified_base 8: mod_base = OTHER; note = Inosine
  misc_feature 1..23: note = source = /note="Description of Artificial Sequence: Synthetic oligonucleotide"
  source 1..23: mol_type = other RNA
atgtaganaggcatgaagcagtt

SEQ ID NO: 2649 - RNA, 21 nt, synthetic construct
  misc_feature 1..21: note = source = /note="Description of Artificial Sequence: Synthetic oligonucleotide"
  source 1..21: mol_type = other RNA
ctgcttcatgcctttctacca

SEQ ID NO: 2650 - RNA, 23 nt, synthetic construct
  modified_base 2: mod_base = OTHER; note = Inosine
  misc_feature 1..23: note = source = /note="Description of Artificial Sequence: Synthetic oligonucleotide"
  source 1..23: mol_type = other RNA
angtagaaaggcatgaagcagtt

SEQ ID NO: 2651 - RNA, 21 nt, synthetic construct
  misc_feature 1..21: note = source = /note="Description of Artificial Sequence: Synthetic oligonucleotide"
  source 1..21: mol_type = other RNA
ctgcttcatgcctttctccaa

SEQ ID NO: 2652 - RNA, 23 nt, synthetic construct
  modified_base 4: mod_base = OTHER; note = Inosine
  misc_feature 1..23: note = source = /note="Description of Artificial Sequence: Synthetic oligonucleotide"
  source 1..23: mol_type = other RNA
atgnagaaaggcatgaagcagtt

SEQ ID NO: 2653 - RNA, 21 nt, synthetic construct
  misc_feature 1..21: note = source = /note="Description of Artificial Sequence: Synthetic oligonucleotide"
  source 1..21: mol_type = other RNA
ctgcttcatgccttcctacaa

SEQ ID NO: 2654 - RNA, 23 nt, synthetic construct
  modified_base 7: mod_base = OTHER; note = Inosine
  misc_feature 1..23: note = source = /note="Description of Artificial Sequence: Synthetic oligonucleotide"
  source 1..23: mol_type = other RNA
atgtagnaaggcatgaagcagtt

SEQ ID NO: 2655 - RNA, 21 nt, synthetic construct
  misc_feature 1..21: note = source = /note="Description of Artificial Sequence: Synthetic oligonucleotide"
  source 1..21: mol_type = other RNA
ctgcttcatgcctctctacaa

SEQ ID NO: 2656 - RNA, 23 nt, synthetic construct
  modified_base 8: mod_base = OTHER; note = Inosine
  misc_feature 1..23: note = source = /note="Description of Artificial Sequence: Synthetic oligonucleotide"
  source 1..23: mol_type = other RNA
atgtaganaggcatgaagcagtt

SEQ ID NO: 2657 - RNA, 21 nt, synthetic construct
  misc_feature 1..21: note = source = /note="Description of Artificial Sequence: Synthetic oligonucleotide"
  source 1..21: mol_type = other RNA
ctgcttcatgcctttctacta

SEQ ID NO: 2658 - RNA, 23 nt, synthetic construct
  misc_feature 1..23: note = source = /note="Description of Artificial Sequence: Synthetic oligonucleotide"
  source 1..23: mol_type = other RNA
aagtagaaaggcatgaagcagtt

SEQ ID NO: 2659 - RNA, 21 nt, synthetic construct
  misc_feature 1..21: note = source = /note="Description of Artificial Sequence: Synthetic oligonucleotide"
  source 1..21: mol_type = other RNA
ctgcttcatgcctttcttcaa

SEQ ID NO: 2660 - RNA, 23 nt, synthetic construct
  misc_feature 1..23: note = source = /note="Description of Artificial Sequence: Synthetic oligonucleotide"
  source 1..23: mol_type = other RNA
atgaagaaaggcatgaagcagtt

SEQ ID NO: 2661 - RNA, 21 nt, synthetic construct
  misc_feature 1..21: note = source = /note="Description of Artificial Sequence: Synthetic oligonucleotide"
  source 1..21: mol_type = other RNA
ctgcttcatgcctttcaacaa

SEQ ID NO: 2662 - RNA, 23 nt, synthetic construct
  misc_feature 1..23: note = source = /note="Description of Artificial Sequence: Synthetic oligonucleotide"
  source 1..23: mol_type = other RNA
atgttgaaaggcatgaagcagtt

SEQ ID NO: 2663 - RNA, 21 nt, synthetic construct
  misc_feature 1..21: note = source = /note="Description of Artificial Sequence: Synthetic oligonucleotide"
  source 1..21: mol_type = other RNA
ctgcttcatgcctatctacaa

SEQ ID NO: 2664 - RNA, 23 nt, synthetic construct
  misc_feature 1..23: note = source = /note="Description of Artificial Sequence: Synthetic oligonucleotide"
  source 1..23: mol_type = other RNA
atgtagataggcatgaagcagtt

SEQ ID NO: 2665 - RNA, 21 nt, synthetic construct
  misc_feature 1..21: note = source = /note="Description of Artificial Sequence: Synthetic oligonucleotide"
  source 1..21: mol_type = other RNA
tgcttcatgcctttctacaca

SEQ ID NO: 2666 - RNA, 23 nt, synthetic construct
  modified_base 2: mod_base = OTHER; note = Inosine
  misc_feature 1..23: note = source = /note="Description of Artificial Sequence: Synthetic oligonucleotide"
  source 1..23: mol_type = other RNA
antgtagaaaggcatgaagcatt

SEQ ID NO: 2667 - RNA, 21 nt, synthetic construct
  misc_feature 1..21: note = source = /note="Description of Artificial Sequence: Synthetic oligonucleotide"
  source 1..21: mol_type = other RNA
tgcttcatgcctttctacaga

SEQ ID NO: 2668 - RNA, 23 nt, synthetic construct
  modified_base 3: mod_base = OTHER; note = Inosine
  misc_feature 1..23: note = source = /note="Description of Artificial Sequence: Synthetic oligonucleotide"
  source 1..23: mol_type = other RNA
acngtagaaaggcatgaagcatt

SEQ ID NO: 2669 - RNA, 21 nt, synthetic construct
  misc_feature 1..21: note = source = /note="Description of Artificial Sequence: Synthetic oligonucleotide"
  source 1..21: mol_type = other RNA
tgcttcatgcctttctacaga

SEQ ID NO: 2670 - RNA, 23 nt, synthetic construct
  modified_base 5: mod_base = OTHER; note = Inosine
  misc_feature 1..23: note = source = /note="Description of Artificial Sequence: Synthetic oligonucleotide"
  source 1..23: mol_type = other RNA
actgnagaaaggcatgaagcatt

SEQ ID NO: 2671 - RNA, 21 nt, synthetic construct
  misc_feature 1..21: note = source = /note="Description of Artificial Sequence: Synthetic oligonucleotide"
  source 1..21: mol_type = other RNA
tgcttcatgcctttctacaga

SEQ ID NO: 2672 - RNA, 23 nt, synthetic construct
  modified_base 6: mod_base = OTHER; note = Inosine
  misc_feature 1..23: note = source = /note="Description of Artificial Sequence: Synthetic oligonucleotide"
  source 1..23: mol_type = other RNA
actgtngaaaggcatgaagcatt

SEQ ID NO: 2673 - RNA, 21 nt, synthetic construct
  misc_feature 1..21: note = source = /note="Description of Artificial Sequence: Synthetic oligonucleotide"
  source 1..21: mol_type = other RNA
tgcttcatgcctttctacaga

SEQ ID NO: 2674 - RNA, 23 nt, synthetic construct
  modified_base 7: mod_base = OTHER; note = Inosine
  misc_feature 1..23: note = source = /note="Description of Artificial Sequence: Synthetic oligonucleotide"
  source 1..23: mol_type = other RNA
actgtanaaaggcatgaagcatt

SEQ ID NO: 2675 - RNA, 21 nt, synthetic construct
  misc_feature 1..21: note = source = /note="Description of Artificial Sequence: Synthetic oligonucleotide"
  source 1..21: mol_type = other RNA
tgcttcatgcctttctaccga

SEQ ID NO: 2676 - RNA, 23 nt, synthetic construct
  modified_base 3: mod_base = OTHER; note = Inosine
  misc_feature 1..23: note = source = /note="Description of Artificial Sequence: Synthetic oligonucleotide"
  source 1..23: mol_type = other RNA
acngtagaaaggcatgaagcatt

SEQ ID NO: 2677 - RNA, 21 nt, synthetic construct
  misc_feature 1..21: note = source = /note="Description of Artificial Sequence: Synthetic oligonucleotide"
  source 1..21: mol_type = other RNA
tgcttcatgcctttctccaga

SEQ ID NO: 2678 - RNA, 23 nt, synthetic construct
  modified_base 5: mod_base = OTHER; note = Inosine
  misc_feature 1..23: note = source = /note="Description of Artificial Sequence: Synthetic oligonucleotide"
  source 1..23: mol_type = other RNA
actgnagaaaggcatgaagcatt

SEQ ID NO: 2679 - RNA, 21 nt, synthetic construct
  misc_feature 1..21: note = source = /note="Description of Artificial Sequence: Synthetic oligonucleotide"
  source 1..21: mol_type = other RNA
tgcttcatgcctttccacaga

SEQ ID NO: 2680 - RNA, 23 nt, synthetic construct
  modified_base 6: mod_base = OTHER; note = Inosine
  misc_feature 1..23: note = source = /note="Description of Artificial Sequence: Synthetic oligonucleotide"
  source 1..23: mol_type = other RNA
actgtngaaaggcatgaagcatt

SEQ ID NO: 2681 - RNA, 21 nt, synthetic construct
  misc_feature 1..21: note = source = /note="Description of Artificial Sequence: Synthetic oligonucleotide"
  source 1..21: mol_type = other RNA
ctgcttcatgcctttctaaaa

SEQ ID NO: 2682 - RNA, 23 nt, synthetic construct
  misc_feature 1..23: note = source = /note="Description of Artificial Sequence: Synthetic oligonucleotide"
  source 1..23: mol_type = other RNA
atttagaaaggcatgaagcagtt

SEQ ID NO: 2683 - RNA, 21 nt, synthetic construct
  misc_feature 1..21: note = source = /note="Description of Artificial Sequence: Synthetic oligonucleotide"
  source 1..21: mol_type = other RNA
ctgcttcatgcctttatacaa

SEQ ID NO: 2684 - RNA, 23 nt, synthetic construct
  misc_feature 1..23: note = source = /note="Description of Artificial Sequence: Synthetic oligonucleotide"
  source 1..23: mol_type = other RNA
atgtataaaggcatgaagcagtt

SEQ ID NO: 2685 - RNA, 21 nt, synthetic construct
  misc_feature 1..21: note = source = /note="Description of Artificial Sequence: Synthetic oligonucleotide"
  source 1..21: mol_type = other RNA
ctgcttcatgcctttctacaa

SEQ ID NO: 2686 - RNA, 23 nt, synthetic construct
  misc_feature 1..23: note = source = /note="Description of Artificial Sequence: Synthetic oligonucleotide"
  source 1..23: mol_type = other RNA
atgtagaaaggcatgaagcagtt

SEQ ID NO: 2687 - DNA, 21 bp, synthetic construct
  misc_feature 1..21: note = source = /note="Description of Artificial Sequence: Synthetic oligonucleotide"
  misc_feature 1..21: note = source = /note="Description of Combined DNA/RNA Molecule: Synthetic oligonucleotide"
  source 1..21: mol_type = other DNA
ctgcttcatgcctttctacaa

SEQ ID NO: 2688 - RNA, 23 nt, synthetic construct
  misc_feature 1..23: note = source = /note="Description of Artificial Sequence: Synthetic oligonucleotide"
  source 1..23: mol_type = other RNA
atgtagaaaggcatgaagcagtt

SEQ ID NO: 2689 - RNA, 21 nt, synthetic construct
  misc_feature 1..21: note = source = /note="Description of Artificial Sequence: Synthetic oligonucleotide"
  source 1..21: mol_type = other RNA
tgcttcatgcctttctacaga

SEQ ID NO: 2690 - RNA, 23 nt, synthetic construct
  misc_feature 1..23: note = source = /note="Description of Artificial Sequence: Synthetic oligonucleotide"
  source 1..23: mol_type = other RNA
tctgtagaaaggcatgaagcatt

SEQ ID NO: 2691 - DNA, 21 bp, synthetic construct
  misc_feature 1..21: note = source = /note="Description of Artificial Sequence: Synthetic oligonucleotide"
  misc_feature 1..21: note = source = /note="Description of Combined DNA/RNA Molecule: Synthetic oligonucleotide"
  source 1..21: mol_type = other DNA
tgcttcatgcctttctacaga

SEQ ID NO: 2692 - RNA, 23 nt, synthetic construct
  misc_feature 1..23: note = source = /note="Description of Artificial Sequence: Synthetic oligonucleotide"
  source 1..23: mol_type = other RNA
tctgtagaaaggcatgaagcatt

SEQ ID NO: 2693 - RNA, 21 nt, synthetic construct
  misc_feature 1..21: note = source = /note="Description of Artificial Sequence: Synthetic oligonucleotide"
  source 1..21: mol_type = other RNA
tcatgcctttctacagtggca

SEQ ID NO: 2694 - RNA, 23 nt, synthetic construct
  misc_feature 1..23: note = source = /note="Description of Artificial Sequence: Synthetic oligonucleotide"
  source 1..23: mol_type = other RNA
agccaatgtagaaaggcatgatt

SEQ ID NO: 2695 - RNA, 21 nt, synthetic construct
  misc_feature 1..21: note = source = /note="Description of Artificial Sequence: Synthetic oligonucleotide"
  source 1..21: mol_type = other RNA
ctgcttcatgcctttctacaa

SEQ ID NO: 2696 - RNA, 23 nt, synthetic construct
  misc_feature 1..23: note = source = /note="Description of Artificial Sequence: Synthetic oligonucleotide"
  source 1..23: mol_type = other RNA
atgtaaaaaggcatgaagcagtt

SEQ ID NO: 2697 - RNA, 21 nt, synthetic construct
  misc_feature 1..21: note = source = /note="Description of Artificial Sequence: Synthetic oligonucleotide"
  source 1..21: mol_type = other RNA
tcatgcctttctacagtggca

SEQ ID NO: 2698 - RNA, 23 nt, synthetic construct
  misc_feature 1..23: note = source = /note="Description of Artificial Sequence: Synthetic oligonucleotide"
  source 1..23: mol_type = other RNA
agccaatgtagaaaggcatgatt

SEQ ID NO: 2699 - RNA, 21 nt, synthetic construct
  misc_feature 1..21: note = source = /note="Description of Artificial Sequence: Synthetic oligonucleotide"
  source 1..21: mol_type = other RNA
ctgcttcatgcctttctacaa

SEQ ID NO: 2700 - RNA, 23 nt, synthetic construct
  modified_base 3: mod_base = OTHER; note = Inosine
  misc_feature 1..23: note = source = /note="Description of Artificial Sequence: Synthetic oligonucleotide"
  source 1..23: mol_type = other RNA
atntagaaaggcatgaagcagtt

SEQ ID NO: 2701 - RNA, 21 nt, synthetic construct
  misc_feature 1..21: note = source = /note="Description of Artificial Sequence: Synthetic oligonucleotide"
  source 1..21: mol_type = other RNA
ctgcttcatgcctttctagaa

SEQ ID NO: 2702 - RNA, 23 nt, synthetic construct
  misc_feature 1..23: note = source = /note="Description of Artificial Sequence: Synthetic oligonucleotide"
  source 1..23: mol_type = other RNA
atctagaaaggcatgaagcagtt

SEQ ID NO: 2703 - RNA, 21 nt, synthetic construct
  misc_feature 1..21: note = source = /note="Description of Artificial Sequence: Synthetic oligonucleotide"
  source 1..21: mol_type = other RNA
ctgcttcatgccttactacaa

SEQ ID NO: 2704 - RNA, 23 nt, synthetic construct
  misc_feature 1..23: note = source = /note="Description of Artificial Sequence: Synthetic oligonucleotide"
  source 1..23: mol_type = other RNA
atgtagtaaggcatgaagcagtt

SEQ ID NO: 2705 - RNA, 21 nt, synthetic construct
  misc_feature 1..21: note = source = /note="Description of Artificial Sequence: Synthetic oligonucleotide"
  source 1..21: mol_type = other RNA
tgcttcatgcctttctacaga

SEQ ID NO: 2706 - RNA, 23 nt, synthetic construct
  modified_base 4: mod_base = OTHER; note = Inosine
  misc_feature 1..23: note = source = /note="Description of Artificial Sequence: Synthetic oligonucleotide"
  source 1..23: mol_type = other RNA
actntagaaaggcatgaagcatt

SEQ ID NO: 2707 - RNA, 21 nt, synthetic construct
  misc_feature 1..21: note = source = /note="Description of Artificial Sequence: Synthetic oligonucleotide"
  source 1..21: mol_type = other RNA
tgcttcatgcctttctacaga

SEQ ID NO: 2708 - RNA, 23 nt, synthetic construct
  modified_base 8: mod_base = OTHER; note = Inosine
  misc_feature 1..23: note = source = /note="Description of Artificial Sequence: Synthetic oligonucleotide"
  source 1..23: mol_type = other RNA
actgtagnaaggcatgaagcatt

SEQ ID NO: 2709 - RNA, 21 nt, synthetic construct
  misc_feature 1..21: note = source = /note="Description of Artificial Sequence: Synthetic oligonucleotide"
  source 1..21: mol_type = other RNA
tgcttcatgccttcctacaga

SEQ ID NO: 2710 - RNA, 23 nt, synthetic construct
  modified_base 8: mod_base = OTHER; note = Inosine
  misc_feature 1..23: note = source = /note="Description of Artificial Sequence: Synthetic oligonucleotide"
  source 1..23: mol_type = other RNA
actgtagnaaggcatgaagcatt

SEQ ID NO: 2711 - RNA, 21 nt, synthetic construct
  misc_feature 1..21: note = source = /note="Description of Artificial Sequence: Synthetic oligonucleotide"
  source 1..21: mol_type = other RNA
ctgcttcatgcctttctataa

SEQ ID NO: 2712 - RNA, 23 nt, synthetic construct
  misc_feature 1..23: note = source = /note="Description of Artificial Sequence: Synthetic oligonucleotide"
  source 1..23: mol_type = other RNA
atatagaaaggcatgaagcagtt

SEQ ID NO: 2713 - RNA, 21 nt, synthetic construct
  misc_feature 1..21: note = source = /note="Description of Artificial Sequence: Synthetic oligonucleotide"
  source 1..21: mol_type = other RNA
ctgcttcatgcctttttacaa

SEQ ID NO: 2714 - RNA, 23 nt, synthetic construct
  misc_feature 1..23: note = source = /note="Description of Artificial Sequence: Synthetic oligonucleotide"
  source 1..23: mol_type = other RNA
atgtaaaaaggcatgaagcagtt

SEQ ID NO: 2715 - RNA, 21 nt, synthetic construct
  misc_feature 1..21: note = source = /note="Description of Artificial Sequence: Synthetic oligonucleotide"
  source 1..21: mol_type = other RNA
ctgcttcatgcctttctacaa

SEQ ID NO: 2716 - RNA, 23 nt, synthetic construct
  misc_feature 1..23: note = source = /note="Description of Artificial Sequence: Synthetic oligonucleotide"
  source 1..23: mol_type = other RNA
atgtagaaaggcatgaagcagtt

SEQ ID NO: 2717 - RNA, 21 nt, synthetic construct
  misc_feature 1..21: note = source = /note="Description of Artificial Sequence: Synthetic oligonucleotide"
  source 1..21: mol_type = other RNA
ctgcttcatgcctttctacaa

SEQ ID NO: 2718 - RNA, 23 nt, synthetic construct
  misc_feature 1..23: note = source = /note="Description of Artificial Sequence: Synthetic oligonucleotide"
  source 1..23: mol_type = other RNA
atgtagaaaggcatgaagcagtt

SEQ ID NO: 2719 - DNA, 21 bp, synthetic construct
  misc_feature 1..21: note = source = /note="Description of Artificial Sequence: Synthetic oligonucleotide"
  misc_feature 1..21: note = source = /note="Description of Combined DNA/RNA Molecule: Synthetic oligonucleotide"
  source 1..21: mol_type = other DNA
ctgcttcatgcctttctacaa

SEQ ID NO: 2720 - RNA, 23 nt, synthetic construct
  misc_feature 1..23: note = source = /note="Description of Artificial Sequence: Synthetic oligonucleotide"
  source 1..23: mol_type = other RNA
atgtagaaaggcatgaagcagtt

SEQ ID NO: 2721 - DNA, 21 bp, synthetic construct
  misc_feature 1..21: note = source = /note="Description of Artificial Sequence: Synthetic oligonucleotide"
  misc_feature 1..21: note = source = /note="Description of Combined DNA/RNA Molecule: Synthetic oligonucleotide"
  source 1..21: mol_type = other DNA
ctgcttcatgcctttctacaa

SEQ ID NO: 2722 - RNA, 23 nt, synthetic construct
  misc_feature 1..23: note = source = /note="Description of Artificial Sequence: Synthetic oligonucleotide"
  source 1..23: mol_type = other RNA
atgtagaaaggcatgaagcagtt

SEQ ID NO: 2723 - RNA, 21 nt, synthetic construct
  misc_feature 1..21: note = source = /note="Description of Artificial Sequence: Synthetic oligonucleotide"
  source 1..21: mol_type = other RNA
ctgcttcatgcctttctacaa

SEQ ID NO: 2724 - RNA, 23 nt, synthetic construct
  misc_feature 1..23: note = source = /note="Description of Artificial Sequence: Synthetic oligonucleotide"
  source 1..23: mol_type = other RNA
aagtagaaaggcatgaagcagtt

SEQ ID NO: 2725 - RNA, 21 nt, synthetic construct
  misc_feature 1..21: note = source = /note="Description of Artificial Sequence: Synthetic oligonucleotide"
  source 1..21: mol_type = other RNA
ctgcttcatgcctttctacaa

SEQ ID NO: 2726 - RNA, 23 nt, synthetic construct
  misc_feature 1..23: note = source = /note="Description of Artificial Sequence: Synthetic oligonucleotide"
  source 1..23: mol_type = other RNA
atgtagaaaggcatgaagcagtt

SEQ ID NO: 2727 - RNA, 21 nt, synthetic construct
  misc_feature 1..21: note = source = /note="Description of Artificial Sequence: Synthetic oligonucleotide"
  source 1..21: mol_type = other RNA
tgcttcatgcctttctacaga

SEQ ID NO: 2728 - RNA, 23 nt, synthetic construct
  misc_feature 1..23: note = source = /note="Description of Artificial Sequence: Synthetic oligonucleotide"
  source 1..23: mol_type = other RNA
tctgtaaaaaggcatgaagcatt

SEQ ID NO: 2729 - RNA, 21 nt, synthetic construct
  misc_feature 1..21: note = source = /note="Description of Artificial Sequence: Synthetic oligonucleotide"
  source 1..21: mol_type = other RNA
ctgcttcatgcctttctacaa

SEQ ID NO: 2730 - RNA, 23 nt, synthetic construct
  modified_base 7: mod_base = OTHER; note = Inosine
  misc_feature 1..23: note = source = /note="Description of Artificial Sequence: Synthetic oligonucleotide"
  source 1..23: mol_type = other RNA
atgtagnaaggcatgaagcagtt

SEQ ID NO: 2731 - RNA, 21 nt, synthetic construct
  misc_feature 1..21: note = source = /note="Description of Artificial Sequence: Synthetic oligonucleotide"
  source 1..21: mol_type = other RNA
ctgcttcatgcctttctacaa

SEQ ID NO: 2732 - RNA, 23 nt, synthetic construct
  misc_feature 1..23: note = source = /note="Description of Artificial Sequence: Synthetic oligonucleotide"
  source 1..23: mol_type = other RNA
atgtagaaaggcatgaagcagtt

SEQ ID NO: 2733 - DNA, 21 bp, synthetic construct
  misc_feature 1..21: note = source = /note="Description of Artificial Sequence: Synthetic oligonucleotide"
  misc_feature 1..21: note = source = /note="Description of Combined DNA/RNA Molecule: Synthetic oligonucleotide"
  source 1..21: mol_type = other DNA
ctgcttcatgcctttctacaa

SEQ ID NO: 2734 - RNA, 23 nt, synthetic construct
  misc_feature 1..23: note = source = /note="Description of Artificial Sequence: Synthetic oligonucleotide"
  source 1..23: mol_type = other RNA
atgtagaaaggcatgaagcagtt

SEQ ID NO: 2735 - RNA, 21 nt, synthetic construct
  misc_feature 1..21: note = source = /note="Description of Artificial Sequence: Synthetic oligonucleotide"
  source 1..21: mol_type = other RNA
ctgcttcatgcctttctacaa

SEQ ID NO: 2736 - RNA, 23 nt, synthetic construct
  misc_feature 1..23: note = source = /note="Description of Artificial Sequence: Synthetic oligonucleotide"
  source 1..23: mol_type = other RNA
atgtagaaaggcatgaagcagtt

SEQ ID NO: 2737 - RNA, 21 nt, synthetic construct
  misc_feature 1..21: note = source = /note="Description of Artificial Sequence: Synthetic oligonucleotide"
  source 1..21: mol_type = other RNA
ctgcttcatgcctttctacaa

SEQ ID NO: 2738 - RNA, 23 nt, synthetic construct
  misc_feature 1..23: note = source = /note="Description of Artificial Sequence: Synthetic oligonucleotide"
  source 1..23: mol_type = other RNA
atgtagaaaggcatgaagcagtt

SEQ ID NO: 2739 - RNA, 21 nt, synthetic construct
  misc_feature 1..21: note = source = /note="Description of Artificial Sequence: Synthetic oligonucleotide"
  source 1..21: mol_type = other RNA
ctgcttcatgcctttctacaa

SEQ ID NO: 2740 - RNA, 23 nt, synthetic construct
  misc_feature 1..23: note = source = /note="Description of Artificial Sequence: Synthetic oligonucleotide"
  source 1..23: mol_type = other RNA
atgtagaaaggcatgaagcagtt

SEQ ID NO: 2741 - RNA, 21 nt, synthetic construct
  misc_feature 1..21: note = source = /note="Description of Artificial Sequence: Synthetic oligonucleotide"
  source 1..21: mol_type = other RNA
ctgcttcatgcctttctacaa

SEQ ID NO: 2742 - RNA, 23 nt, synthetic construct
  misc_feature 1..23: note = source = /note="Description of Artificial Sequence: Synthetic oligonucleotide"
  source 1..23: mol_type = other RNA
atgtagaaaggcatgaagcagtt

SEQ ID NO: 2743 - RNA, 21 nt, synthetic construct
  misc_feature 1..21: note = source = /note="Description of Artificial Sequence: Synthetic oligonucleotide"
  source 1..21: mol_type = other RNA
ctgcttcatgcctttctacaa

SEQ ID NO: 2744 - RNA, 23 nt, synthetic construct
  misc_feature 1..23: note = source = /note="Description of Artificial Sequence: Synthetic oligonucleotide"
  source 1..23: mol_type = other RNA
atgtagaaaggcatgaagcagtt

SEQ ID NO: 2745 - RNA, 21 nt, synthetic construct
  misc_feature 1..21: note = source = /note="Description of Artificial Sequence: Synthetic oligonucleotide"
  source 1..21: mol_type = other RNA
ctgcttcatgcctttctacaa

SEQ ID NO: 2746 - RNA, 23 nt, synthetic construct
  misc_feature 1..23: note = source = /note="Description of Artificial Sequence: Synthetic oligonucleotide"
  source 1..23: mol_type = other RNA
atgtagaaaggcatgaagcagtt

SEQ ID NO: 2747 - DNA, 21 bp, synthetic construct
  misc_feature 1..21: note = source = /note="Description of Artificial Sequence: Synthetic oligonucleotide"
  misc_feature 1..21: note = source = /note="Description of Combined DNA/RNA Molecule: Synthetic oligonucleotide"
  source 1..21: mol_type = other DNA
ctgcttcatgcctttctacaa

SEQ ID NO: 2748 - RNA, 23 nt, synthetic construct
  misc_feature 1..23: note = source = /note="Description of Artificial Sequence: Synthetic oligonucleotide"
  source 1..23: mol_type = other RNA
atgtagaaaggcatgaagcagtt

SEQ ID NO: 2749 - RNA, 21 nt, synthetic construct
  misc_feature 1..21: note = source = /note="Description of Artificial Sequence: Synthetic oligonucleotide"
  source 1..21: mol_type = other RNA
ctgcttcatgcctttctacaa

SEQ ID NO: 2750 - RNA, 23 nt, synthetic construct
  misc_feature 1..23: note = source = /note="Description of Artificial Sequence: Synthetic oligonucleotide"
  source 1..23: mol_type = other RNA
atgtagaaaggcatgaagcagtt

SEQ ID NO: 2751 - RNA, 21 nt, synthetic construct
  misc_feature 1..21: note = source = /note="Description of Artificial Sequence: Synthetic oligonucleotide"
  source 1..21: mol_type = other RNA
tcatgcctttctacagtggca

SEQ ID NO: 2752 - RNA, 23 nt, synthetic construct
  misc_feature 1..23: note = source = /note="Description of Artificial Sequence: Synthetic oligonucleotide"
  source 1..23: mol_type = other RNA
agccaatgtagaaaggcatgatt

SEQ ID NO: 2753 - RNA, 21 nt, synthetic construct
  misc_feature 1..21: note = source = /note="Description of Artificial Sequence: Synthetic oligonucleotide"
  source 1..21: mol_type = other RNA
tcatgcctttctacagtggca

SEQ ID NO: 2754 - RNA, 23 nt, synthetic construct
  misc_feature 1..23: note = source = /note="Description of Artificial Sequence: Synthetic oligonucleotide"
  source 1..23: mol_type = other RNA
agccaatgtagaaaggcatgatt

SEQ ID NO: 2755 - RNA, 21 nt, synthetic construct
  misc_feature 1..21: note = source = /note="Description of Artificial Sequence: Synthetic oligonucleotide"
  source 1..21: mol_type = other RNA
ctgcttcatgggattctacaa

SEQ ID NO: 2756 - RNA, 23 nt, synthetic construct
  misc_feature 1..23: note = source = /note="Description of Artificial Sequence: Synthetic oligonucleotide"
  source 1..23: mol_type = other RNA
atgtagaatcccatgaagcagtt

SEQ ID NO: 2757 - RNA, 21 nt, synthetic construct
  misc_feature 1..21: note = source = /note="Description of Artificial Sequence: Synthetic oligonucleotide"
  source 1..21: mol_type = other RNA
ctgcttcatgcctttctacaa

SEQ ID NO: 2758 - RNA, 23 nt, synthetic construct
  misc_feature 1..23: note = source = /note="Description of Artificial Sequence: Synthetic oligonucleotide"
  source 1..23: mol_type = other RNA
atgtagaaaggcatgaagcagtt

SEQ ID NO: 2759 - RNA, 21 nt, synthetic construct
  misc_feature 1..21: note = source = /note="Description of Artificial Sequence: Synthetic oligonucleotide"
  source 1..21: mol_type = other RNA
gtatgttcctgcttcatgcca

SEQ ID NO: 2760 - RNA, 23 nt, synthetic construct
  misc_feature 1..23: note = source = /note="Description of Artificial Sequence: Synthetic oligonucleotide"
  source 1..23: mol_type = other RNA
aggcatgaagcaggaacatactt

SEQ ID NO: 2761 - RNA, 21 nt, synthetic construct
  misc_feature 1..21: note = source = /note="Description of Artificial Sequence: Synthetic oligonucleotide"
  source 1..21: mol_type = other RNA
tgtcctgcttcatgcctttca

SEQ ID NO: 2762 - RNA, 23 nt, synthetic construct
  misc_feature 1..23: note = source = /note="Description of Artificial Sequence: Synthetic oligonucleotide"
  source 1..23: mol_type = other RNA
agaaaggcatgaagcaggacatt

SEQ ID NO: 2763 - RNA, 21 nt, synthetic construct
  misc_feature 1..21: note = source = /note="Description of Artificial Sequence: Synthetic oligonucleotide"
  source 1..21: mol_type = other RNA
gcttcatgcctttctacagta

SEQ ID NO: 2764 - RNA, 23 nt, synthetic construct
  misc_feature 1..23: note = source = /note="Description of Artificial Sequence: Synthetic oligonucleotide"
  source 1..23: mol_type = other RNA
aactgtagaaaggcatgaagctt

SEQ ID NO: 2765 - RNA, 21 nt, synthetic construct
  misc_feature 1..21: note = source = /note="Description of Artificial Sequence: Synthetic oligonucleotide"
  source 1..21: mol_type = other RNA
cttcatgcctttctacagtga

SEQ ID NO: 2766 - RNA, 23 nt, synthetic construct
  misc_feature 1..23: note = source = /note="Description of Artificial Sequence: Synthetic oligonucleotide"
  source 1..23: mol_type = other RNA
acactgtagaaaggcatgaagtt

SEQ ID NO: 2767 - RNA, 21 nt, synthetic construct
  misc_feature 1..21: note = source = /note="Description of Artificial Sequence: Synthetic oligonucleotide"
  source 1..21: mol_type = other RNA
ttcatgcctttctacagtgga

SEQ ID NO: 2768 - RNA, 23 nt, synthetic construct
  misc_feature 1..23: note = source = /note="Description of Artificial Sequence: Synthetic oligonucleotide"
  source 1..23: mol_type = other RNA
accactgtagaaaggcatgaatt

SEQ ID NO: 2769 - RNA, 21 nt, synthetic construct
  misc_feature 1..21: note = source = /note="Description of Artificial Sequence: Synthetic oligonucleotide"
  source 1..21: mol_type = other RNA
ctgcttcatgcctttcaacaa

SEQ ID NO: 2770 - RNA, 23 nt, synthetic construct
  misc_feature 1..23: note = source = /note="Description of Artificial Sequence: Synthetic oligonucleotide"
  source 1..23: mol_type = other RNA
atgttgaaaggcatgaagcagtt

SEQ ID NO: 2771 - RNA, 21 nt, synthetic construct
  misc_feature 1..21: note = source = /note="Description of Artificial Sequence: Synthetic oligonucleotide"
  source 1..21: mol_type = other RNA
ctgcttcatgcctttctccaa

SEQ ID NO: 2772 - RNA, 23 nt, synthetic construct
  modified_base 4: mod_base = OTHER; note = Inosine
  misc_feature 1..23: note = source = /note="Description of Artificial Sequence: Synthetic oligonucleotide"
  source 1..23: mol_type = other RNA
atgnagaaaggcatgaagcagtt

SEQ ID NO: 2773 - RNA, 21 nt, synthetic construct
  misc_feature 1..21: note = source = /note="Description of Artificial Sequence: Synthetic oligonucleotide"
  source 1..21: mol_type = other RNA
tgcttcatgcctttctccaga

SEQ ID NO: 2774 - RNA, 23 nt, synthetic construct
  modified_base 5: mod_base = OTHER; note = Inosine
  misc_feature 1..23: note = source = /note="Description of Artificial Sequence: Synthetic oligonucleotide"
  source 1..23: mol_type = other RNA
actgnagaaaggcatgaagcatt

SEQ ID NO: 2775 - RNA, 21 nt, synthetic construct
  misc_feature 1..21: note = source = /note="Description of Artificial Sequence: Synthetic oligonucleotide"
  source 1..21: mol_type = other RNA
ctgcttcatgcctttctacaa

SEQ ID NO: 2776 - RNA, 23 nt, synthetic construct
  modified_base 5: mod_base = OTHER; note = Inosine
  misc_feature 1..23: note = source = /note="Description of Artificial Sequence: Synthetic oligonucleotide"
  source 1..23: mol_type = other RNA
atgtngaaaggcatgaagcagtt

SEQ ID NO: 2777 - RNA, 21 nt, synthetic construct
  misc_feature 1..21: note = source = /note="Description of Artificial Sequence: Synthetic oligonucleotide"
  source 1..21: mol_type = other RNA
tgcttcatgcctttctacaga

SEQ ID NO: 2778 - RNA, 23 nt, synthetic construct
  modified_base 6: mod_base = OTHER; note = Inosine
  misc_feature 1..23: note = source = /note="Description of Artificial Sequence: Synthetic oligonucleotide"
  source 1..23: mol_type = other RNA
actgtngaaaggcatgaagcatt

SEQ ID NO: 2779 - RNA, 21 nt, synthetic construct
  misc_feature 1..21: note = source = /note="Description of Artificial Sequence: Synthetic oligonucleotide"
  source 1..21: mol_type = other RNA
ctgcttcatgcctttctacaa

SEQ ID NO: 2780 - RNA, 23 nt, synthetic construct
  modified_base 6: mod_base = OTHER; note = Inosine
  misc_feature 1..23: note = source = /note="Description of Artificial Sequence: Synthetic oligonucleotide"
  source 1..23: mol_type = other RNA
atgtanaaaggcatgaagcagtt

SEQ ID NO: 2781 - RNA, 21 nt, synthetic construct
  misc_feature 1..21: note = source = /note="Description of Artificial Sequence: Synthetic oligonucleotide"
  source 1..21: mol_type = other RNA
tgcttcatgcctttctacaga

SEQ ID NO: 2782 - RNA, 23 nt, synthetic construct
  modified_base 7: mod_base = OTHER; note = Inosine
  misc_feature 1..23: note = source = /note="Description of Artificial Sequence: Synthetic oligonucleotide"
  source 1..23: mol_type = other RNA
actgtanaaaggcatgaagcatt

SEQ ID NO: 2783 - RNA, 21 nt, synthetic construct
  misc_feature 1..21: note = source = /note="Description of Artificial Sequence: Synthetic oligonucleotide"
  source 1..21: mol_type = other RNA
ctgcttcatgccttcctacaa

SEQ ID NO: 2784 - RNA, 23 nt, synthetic construct
  modified_base 7: mod_base = OTHER; note = Inosine
  misc_feature 1..23: note = source = /note="Description of Artificial Sequence: Synthetic oligonucleotide"
  source 1..23: mol_type = other RNA
atgtagnaaggcatgaagcagtt

SEQ ID NO: 2785 - RNA, 21 nt, synthetic construct
  misc_feature 1..21: note = source = /note="Description of Artificial Sequence: Synthetic oligonucleotide"
  source 1..21: mol_type = other RNA
ctgcttcatgcctctctacaa

SEQ ID NO: 2786 - RNA, 23 nt, synthetic construct
  modified_base 8: mod_base = OTHER; note = Inosine
  misc_feature 1..23: note = source = /note="Description of Artificial Sequence: Synthetic oligonucleotide"
  source 1..23: mol_type = other RNA
atgtaganaggcatgaagcagtt

SEQ ID NO: 2787 - RNA, 21 nt, synthetic construct
  misc_feature 1..21: note = source = /note="Description of Artificial Sequence: Synthetic oligonucleotide"
  source 1..21: mol_type = other RNA
tgcttcatgcctttctacaga

SEQ ID NO: 2788 - RNA, 23 nt, synthetic construct
  misc_feature 1..23: note = source = /note="Description of Artificial Sequence: Synthetic oligonucleotide"
  source 1..23: mol_type = other RNA
tctgaagaaaggcatgaagcatt

SEQ ID NO: 2789 - RNA, 21 nt, synthetic construct
  misc_feature 1..21: note = source = /note="Description of Artificial Sequence: Synthetic oligonucleotide"
  source 1..21: mol_type = other RNA
tgcttcatgcctttctacaga

SEQ ID NO: 2790 - RNA, 23 nt, synthetic construct
  misc_feature 1..23: note = source = /note="Description of Artificial Sequence: Synthetic oligonucleotide"
  source 1..23: mol_type = other RNA
tctgtagaaaggcatgaagcatt

SEQ ID NO: 2791 - RNA, 21 nt, synthetic construct
  misc_feature 1..21: note = source = /note="Description of Artificial Sequence: Synthetic oligonucleotide"
  source 1..21: mol_type = other RNA
tcatgcctttctacagtggca

SEQ ID NO: 2792 - RNA, 23 nt, synthetic construct
  misc_feature 1..23: note = source = /note="Description of Artificial Sequence: Synthetic oligonucleotide"
  source 1..23: mol_type = other RNA
agccaatgtagaaaggcatgatt

SEQ ID NO: 2793 - DNA, 21 bp, synthetic construct
  misc_feature 1..21: note = source = /note="Description of Artificial Sequence: Synthetic oligonucleotide"
  misc_feature 1..21: note = source = /note="Description of Combined DNA/RNA Molecule: Synthetic oligonucleotide"
  source 1..21: mol_type = other DNA
ctgcttcatgcctttctacaa

SEQ ID NO: 2794 - RNA, 23 nt, synthetic construct
  misc_feature 1..23: note = source = /note="Description of Artificial Sequence: Synthetic oligonucleotide"
  source 1..23: mol_type = other RNA
atgtagaaaggcatgaagcagtt

SEQ ID NO: 2795 - DNA, 21 bp, synthetic construct
  misc_feature 1..21: note = source = /note="Description of Artificial Sequence: Synthetic oligonucleotide"
  misc_feature 1..21: note = source = /note="Description of Combined DNA/RNA Molecule: Synthetic oligonucleotide"
  source 1..21: mol_type = other DNA
ctgcttcatgcctttctacaa

SEQ ID NO: 2796 - RNA, 23 nt, synthetic construct
  misc_feature 1..23: note = source = /note="Description of Artificial Sequence: Synthetic oligonucleotide"
  source 1..23: mol_type = other RNA
atgtagaaaggcatgaagcagtt

SEQ ID NO: 2797 - DNA, 21 bp, synthetic construct
  misc_feature 1..21: note = source = /note="Description of Artificial Sequence: Synthetic oligonucleotide"
  misc_feature 1..21: note = source = /note="Description of Combined DNA/RNA Molecule: Synthetic oligonucleotide"
  source 1..21: mol_type = other DNA
tgcttcatgcctttctacaga

SEQ ID NO: 2798 - RNA, 23 nt, synthetic construct
  misc_feature 1..23: note = source = /note="Description of Artificial Sequence: Synthetic oligonucleotide"
  source 1..23: mol_type = other RNA
tctgtagaaaggcatgaagcatt

SEQ ID NO: 2799 - RNA, 21 nt, synthetic construct
  misc_feature 1..21: note = source = /note="Description of Artificial Sequence: Synthetic oligonucleotide"
  source 1..21: mol_type = other RNA
tgcttcatgcctttctacaga

SEQ ID NO: 2800 - RNA, 23 nt, synthetic construct
  misc_feature 1..23: note = source = /note="Description of Artificial Sequence: Synthetic oligonucleotide"
  source 1..23: mol_type = other RNA
tctgtagaaaggcatgaagcatt

SEQ ID NO: 2801 - RNA, 21 nt, synthetic construct
  misc_feature 1..21: note = source = /note="Description of Artificial Sequence: Synthetic oligonucleotide"
  source 1..21: mol_type = other RNA
tcatgcctttctacagtggca

SEQ ID NO: 2802 - RNA, 23 nt, synthetic construct
  misc_feature 1..23: note = source = /note="Description of Artificial Sequence: Synthetic oligonucleotide"
  source 1..23: mol_type = other RNA
agccaatgtagaaaggcatgatt

SEQ ID NO: 2803 - RNA, 21 nt, synthetic construct
  misc_feature 1..21: note = source = /note="Description of Artificial Sequence: Synthetic oligonucleotide"
  source 1..21: mol_type = other RNA
ctgcttcatgcctttctacaa

SEQ ID NO: 2804 - RNA, 23 nt, synthetic construct
  modified_base 3: mod_base = OTHER; note = Inosine
  misc_feature 1..23: note = source = /note="Description of Artificial Sequence: Synthetic oligonucleotide"
  source 1..23: mol_type = other RNA
atntagaaaggcatgaagcagtt

SEQ ID NO: 2805 - RNA, 21 nt, synthetic construct
  misc_feature 1..21: note = source = /note="Description of Artificial Sequence: Synthetic oligonucleotide"
  source 1..21: mol_type = other RNA
ctgcttcatgcctttctacaa

SEQ ID NO: 2806 - RNA, 23 nt, synthetic construct
  modified_base 7: mod_base = OTHER; note = Inosine
  misc_feature 1..23: note = source = /note="Description of Artificial Sequence: Synthetic oligonucleotide"
  source 1..23: mol_type = other RNA
atgtagnaaggcatgaagcagtt

SEQ ID NO: 2807 - RNA, 21 nt, synthetic construct
  misc_feature 1..21: note = source = /note="Description of Artificial Sequence: Synthetic oligonucleotide"
  source 1..21: mol_type = other RNA
ctgcttcatgccttactacaa

SEQ ID NO: 2808 - RNA, 23 nt, synthetic construct
  misc_feature 1..23: note = source = /note="Description of Artificial Sequence: Synthetic oligonucleotide"
  source 1..23: mol_type = other RNA
atgtagtaaggcatgaagcagtt

SEQ ID NO: 2809 - RNA, 21 nt, synthetic construct
  misc_feature 1..21: note = source = /note="Description of Artificial Sequence: Synthetic oligonucleotide"
  source 1..21: mol_type = other RNA
tgcttcatgcctttctacaga

SEQ ID NO: 2810 - RNA, 23 nt, synthetic construct
  modified_base 8: mod_base = OTHER; note = Inosine
  misc_feature 1..23: note = source = /note="Description of Artificial Sequence: Synthetic oligonucleotide"
  source 1..23: mol_type = other RNA
actgtagnaaggcatgaagcatt

SEQ ID NO: 2811 - RNA, 21 nt, synthetic construct
  misc_feature 1..21: note = source = /note="Description of Artificial Sequence: Synthetic oligonucleotide"
  source 1..21: mol_type = other RNA
tgcttcatgccttcctacaga

SEQ ID NO: 2812 - RNA, 23 nt, synthetic construct
  modified_base 8: mod_base = OTHER; note = Inosine
  misc_feature 1..23: note = source = /note="Description of Artificial Sequence: Synthetic oligonucleotide"
  source 1..23: mol_type = other RNA
actgtagnaaggcatgaagcatt

SEQ ID NO: 2813 - RNA, 21 nt, synthetic construct
  misc_feature 1..21: note = source = /note="Description of Artificial Sequence: Synthetic oligonucleotide"
  source 1..21: mol_type = other RNA
tgcttcatgcctttctacaga

SEQ ID NO: 2814 - RNA, 23 nt, synthetic construct
  modified_base 4: mod_base = OTHER; note = Inosine
  misc_feature 1..23: note = source = /note="Description of Artificial Sequence: Synthetic oligonucleotide"
  source 1..23: mol_type = other RNA
actntagaaaggcatgaagcatt

SEQ ID NO: 2815 - RNA, 21 nt, synthetic construct
  misc_feature 1..21: note = source = /note="Description of Artificial Sequence: Synthetic oligonucleotide"
  source 1..21: mol_type = other RNA
ctgcttcatgcctttctacaa

SEQ ID NO: 2816 - RNA, 23 nt, synthetic construct
  modified_base 5: mod_base = OTHER; note = Inosine
  misc_feature 1..23: note = source = /note="Description of Artificial Sequence: Synthetic oligonucleotide"
  source 1..23: mol_type = other RNA
atgtngaaaggcatgaagcagtt

SEQ ID NO: 2817 - RNA, 21 nt, synthetic construct
  misc_feature 1..21: note = source = /note="Description of Artificial Sequence: Synthetic oligonucleotide"
  source 1..21: mol_type = other RNA
ctgcttcatgcctttctacaa

SEQ ID NO: 2818 - RNA, 23 nt, synthetic construct
  modified_base 5: mod_base = OTHER; note = Inosine
  misc_feature 1..23: note = source = /note="Description of Artificial Sequence: Synthetic oligonucleotide"
  source 1..23: mol_type = other RNA
atgtngaaaggcatgaagcagtt

SEQ ID NO: 2819 - RNA, 21 nt, synthetic construct
  misc_feature 1..21: note = source = /note="Description of Artificial Sequence: Synthetic oligonucleotide"
  source 1..21: mol_type = other RNA
ctgcttcatgcctttctacaa

SEQ ID NO: 2820 - RNA, 23 nt, synthetic construct
  modified_base 5: mod_base = OTHER; note = Inosine
  misc_feature 1..23: note = source = /note="Description of Artificial Sequence: Synthetic oligonucleotide"
  source 1..23: mol_type = other RNA
atgtngaaaggcatgaagcagtt

SEQ ID NO: 2821 - RNA, 21 nt, synthetic construct
  misc_feature 1..21: note = source = /note="Description of Artificial Sequence: Synthetic oligonucleotide"
  source 1..21: mol_type = other RNA
ctgcttcatgcctttctacaa

SEQ ID NO: 2822 - RNA, 23 nt, synthetic construct
  modified_base 7: mod_base = OTHER; note = Inosine
  misc_feature 1..23: note = source = /note="Description of Artificial Sequence: Synthetic oligonucleotide"
  source 1..23: mol_type = other RNA
atgtagnaaggcatgaagcagtt

SEQ ID NO: 2823 - RNA, 21 nt, synthetic construct
  misc_feature 1..21: note = source = /note="Description of Artificial Sequence: Synthetic oligonucleotide"
  source 1..21: mol_type = other RNA
tcatgcctttctacagtggca

SEQ ID NO: 2824 - RNA, 23 nt, synthetic construct
  misc_feature 1..23: note = source = /note="Description of Artificial Sequence: Synthetic oligonucleotide"
  source 1..23: mol_type = other RNA
agccaatgtagaaaggcatgatt

SEQ ID NO: 2825 - RNA, 21 nt, synthetic construct
  misc_feature 1..21: note = source = /note="Description of Artificial Sequence: Synthetic oligonucleotide"
  source 1..21: mol_type = other RNA
tcatgcctttctacagtggca

SEQ ID NO: 2826 - RNA, 23 nt, synthetic construct
  misc_feature 1..23: note = source = /note="Description of Artificial Sequence: Synthetic oligonucleotide"
  source 1..23: mol_type = other RNA
agccaatgtagaaaggcatgatt

SEQ ID NO: 2827 - RNA, 21 nt, synthetic construct
  misc_feature 1..21: note = source = /note="Description of Artificial Sequence: Synthetic oligonucleotide"
  source 1..21: mol_type = other RNA
ctgcttcatgggattgtacaa

SEQ ID NO: 2828 - RNA, 23 nt, synthetic construct
  misc_feature 1..23: note = source = /note="Description of Artificial Sequence: Synthetic oligonucleotide"
  source 1..23: mol_type = other RNA
atgtacaatcccatgaagcagtt

SEQ ID NO: 2829 - DNA, 21 bp, synthetic construct
  misc_feature 1..21: note = source = /note="Description of Artificial Sequence: Synthetic oligonucleotide"
  misc_feature 1..21: note = source = /note="Description of Combined DNA/RNA Molecule: Synthetic oligonucleotide"
  source 1..21: mol_type = other DNA
ctgcttcatgcctttctacaa

SEQ ID NO: 2830 - RNA, 23 nt, synthetic construct
  modified_base 5: mod_base = OTHER; note = Inosine
  misc_feature 1..23: note = source = /note="Description of Artificial Sequence: Synthetic oligonucleotide"
  source 1..23: mol_type = other RNA
atgtngaaaggcatgaagcagtt

SEQ ID NO: 2831 - RNA, 21 nt, synthetic construct
  misc_feature 1..21: note = source = /note="Description of Artificial Sequence: Synthetic oligonucleotide"
  source 1..21: mol_type = other RNA
tgcttcatgcctttctacaga

SEQ ID NO: 2832 - RNA, 23 nt, synthetic construct
  modified_base 7: mod_base = OTHER; note = Inosine
  misc_feature 1..23: note = source = /note="Description of Artificial Sequence: Synthetic oligonucleotide"
  source 1..23: mol_type = other RNA
actgtanaaaggcatgaagcatt

SEQ ID NO: 2833 - DNA, 21 bp, synthetic construct
  misc_feature 1..21: note = source = /note="Description of Artificial Sequence: Synthetic oligonucleotide"
  misc_feature 1..21: note = source = /note="Description of Combined DNA/RNA Molecule: Synthetic oligonucleotide"
  source 1..21: mol_type = other DNA
ctgcttcatgcctttctacaa

SEQ ID NO: 2834 - RNA, 23 nt, synthetic construct
  misc_feature 1..23: note = source = /note="Description of Artificial Sequence: Synthetic oligonucleotide"
  source 1..23: mol_type = other RNA
atgtagaaaggcatgaagcagtt

SEQ ID NO: 2835 - DNA, 21 bp, synthetic construct
  misc_feature 1..21: note = source = /note="Description of Artificial Sequence: Synthetic oligonucleotide"
  misc_feature 1..21: note = source = /note="Description of Combined DNA/RNA Molecule: Synthetic oligonucleotide"
  source 1..21: mol_type = other DNA
ctgcttcatgcctttctacaa

SEQ ID NO: 2836 - RNA, 23 nt, synthetic construct
  misc_feature 1..23: note = source = /note="Description of Artificial Sequence: Synthetic oligonucleotide"
  source 1..23: mol_type = other RNA
atgtagaaaggcatgaagcagtt

SEQ ID NO: 2837 - DNA, 21 bp, synthetic construct
  misc_feature 1..21: note = source = /note="Description of Artificial Sequence: Synthetic oligonucleotide"
  misc_feature 1..21: note = source = /note="Description of Combined DNA/RNA Molecule: Synthetic oligonucleotide"
  source 1..21: mol_type = other DNA
ctgcttcatgcctttctacaa

SEQ ID NO: 2838 - RNA, 23 nt, synthetic construct
  modified_base 7: mod_base = OTHER; note = Inosine
  misc_feature 1..23: note = source = /note="Description of Artificial Sequence: Synthetic oligonucleotide"
  source 1..23: mol_type = other RNA
atgtagnaaggcatgaagcagtt

SEQ ID NO: 2839 - RNA, 21 nt, synthetic construct
  misc_feature 1..21: note = source = /note="Description of Artificial Sequence: Synthetic oligonucleotide"
  source 1..21: mol_type = other RNA
tcatgcctttctacagtggca

SEQ ID NO: 2840 - RNA, 23 nt, synthetic construct
  misc_feature 1..23: note = source = /note="Description of Artificial Sequence: Synthetic oligonucleotide"
  source 1..23: mol_type = other RNA
agccactgtagaaaggcatgatt

SEQ ID NO: 2841 - RNA, 21 nt, synthetic construct
  misc_feature 1..21: note = source = /note="Description of Artificial Sequence: Synthetic oligonucleotide"
  source 1..21: mol_type = other RNA
tatgttcctgcttcatgccta

SEQ ID NO: 2842 - RNA, 23 nt, synthetic construct
  misc_feature 1..23: note = source = /note="Description of Artificial Sequence: Synthetic oligonucleotide"
  source 1..23: mol_type = other RNA
aaggcatgaagcaggaacatatt

SEQ ID NO: 2843 - RNA, 21 nt, synthetic construct
  misc_feature 1..21: note = source = /note="Description of Artificial Sequence: Synthetic oligonucleotide"
  source 1..21: mol_type = other RNA
tgcttcatgcctttctacaga

SEQ ID NO: 2844 - RNA, 23 nt, synthetic construct
  misc_feature 1..23: note = source = /note="Description of Artificial Sequence: Synthetic oligonucleotide"
  source 1..23: mol_type = other RNA
actgtagaaaggcatgaagcatt

SEQ ID NO: 2845 - RNA, 21 nt, synthetic construct
  misc_feature 1..21: note = source = /note="Description of Artificial Sequence: Synthetic oligonucleotide"
  source 1..21: mol_type = other RNA
tgttcctgcttcatgccttta

SEQ ID NO: 2846 - RNA, 21 nt, synthetic construct
  misc_feature 1..21: note = source = /note="Description of Artificial Sequence: Synthetic oligonucleotide"
  source 1..21: mol_type = other RNA
aaggcatgaagcaggaacatt

SEQ ID NO: 2847 - RNA, 21 nt, synthetic construct
  misc_feature 1..21: note = source = /note="Description of Artificial Sequence: Synthetic oligonucleotide"
  source 1..21: mol_type = other RNA
ctgcttcatgcctttctacaa

SEQ ID NO: 2848 - RNA, 23 nt, synthetic construct
  misc_feature 1..23: note = source = /note="Description of Artificial Sequence: Synthetic oligonucleotide"
  source 1..23: mol_type = other RNA
atgtagaaaggcatgaagcagtt

SEQ ID NO: 2849 - RNA, 21 nt, synthetic construct
  misc_feature 1..21: note = source = /note="Description of Artificial Sequence: Synthetic oligonucleotide"
  source 1..21: mol_type = other RNA
tatgttcctgcttcatgccta

SEQ ID NO: 2850 - RNA, 23 nt, synthetic construct
  misc_feature 1..23: note = source = /note="Description of Artificial Sequence: Synthetic oligonucleotide"
  source 1..23: mol_type = other RNA
aaggcatgaagcaggaacatatt

SEQ ID NO: 2851 - RNA, 19 nt, synthetic construct
  misc_feature 1..19: note = source = /note="Description of Artificial Sequence: Synthetic oligonucleotide"
  source 1..19: mol_type = other RNA
tgttcctgcttcatgccta

SEQ ID NO: 2852 - RNA, 21 nt, synthetic construct
  misc_feature 1..21: note = source = /note="Description of Artificial Sequence: Synthetic oligonucleotide"
  source 1..21: mol_type = other RNA
aaggcatgaagcaggaacatt

SEQ ID NO: 2853 - RNA, 22 nt, synthetic construct
  misc_feature 1..22: note = source = /note="Description of Artificial Sequence: Synthetic oligonucleotide"
  source 1..22: mol_type = other RNA
tatgttcctgcttcatgcctta

SEQ ID NO: 2854 - RNA, 23 nt, synthetic construct
  misc_feature 1..23: note = source = /note="Description of Artificial Sequence: Synthetic oligonucleotide"
  source 1..23: mol_type = other RNA
aaggcatgaagcaggaacatatt

SEQ ID NO: 2855 - RNA, 21 nt, synthetic construct
  misc_feature 1..21: note = source = /note="Description of Artificial Sequence: Synthetic oligonucleotide"
  source 1..21: mol_type = other RNA
tatgttcctgcttcatgccta

SEQ ID NO: 2856 - RNA, 23 nt, synthetic construct
  misc_feature 1..23: note = source = /note="Description of Artificial Sequence: Synthetic oligonucleotide"
  source 1..23: mol_type = other RNA
aaggcatgaagcaggaacatacc

SEQ ID NO: 2857 - RNA, 22 nt, synthetic construct
  misc_feature 1..22: note = source = /note="Description of Artificial Sequence: Synthetic oligonucleotide"
  source 1..22: mol_type = other RNA
tatgttcctgcttcatgcctta

SEQ ID NO: 2858 - RNA, 23 nt, synthetic construct
  misc_feature 1..23: note = source = /note="Description of Artificial Sequence: Synthetic oligonucleotide"
  source 1..23: mol_type = other RNA
aaggcatgaagcaggaacatacc

SEQ ID NO: 2859 - RNA, 21 nt, synthetic construct
  misc_feature 1..21: note = source = /note="Description of Artificial Sequence: Synthetic oligonucleotide"
  source 1..21: mol_type = other RNA
tatgttcctgcttcatgccta

SEQ ID NO: 2860 - RNA, 23 nt, synthetic construct
  misc_feature 1..23: note = source = /note="Description of Artificial Sequence: Synthetic oligonucleotide"
  source 1..23: mol_type = other RNA
aaggcatgaagcaggaacatatt

SEQ ID NO: 2861 - RNA, 21 nt, synthetic construct
  misc_feature 1..21: note = source = /note="Description of Artificial Sequence: Synthetic oligonucleotide"
  source 1..21: mol_type = other RNA
tatgttcctgcttcatgcgta

SEQ ID NO: 2862 - RNA, 23 nt, synthetic construct
  misc_feature 1..23: note = source = /note="Description of Artificial Sequence: Synthetic oligonucleotide"
  source 1..23: mol_type = other RNA
aacgcatgaagcaggaacatatt

SEQ ID NO: 2863 - RNA, 21 nt, synthetic construct
  misc_feature 1..21: note = source = /note="Description of Artificial Sequence: Synthetic oligonucleotide"
  source 1..21: mol_type = other RNA
tatgttcctgcttcatggcta

SEQ ID NO: 2864 - RNA, 23 nt, synthetic construct
  misc_feature 1..23: note = source = /note="Description of Artificial Sequence: Synthetic oligonucleotide"
  source 1..23: mol_type = other RNA
aagccatgaagcaggaacatatt

SEQ ID NO: 2865 - RNA, 21 nt, synthetic construct
  misc_feature 1..21: note = source = /note="Description of Artificial Sequence: Synthetic oligonucleotide"
  source 1..21: mol_type = other RNA
tatgttcctgcttcaagccta

SEQ ID NO: 2866 - RNA, 23 nt, synthetic construct
  misc_feature 1..23: note = source = /note="Description of Artificial Sequence: Synthetic oligonucleotide"
  source 1..23: mol_type = other RNA
aaggcttgaagcaggaacatatt

SEQ ID NO: 2867 - RNA, 21 nt, synthetic construct
  misc_feature 1..21: note = source = /note="Description of Artificial Sequence: Synthetic oligonucleotide"
  source 1..21: mol_type = other RNA
tatgttcctgcttcttgccta

SEQ ID NO: 2868 - RNA, 23 nt, synthetic construct
  misc_feature 1..23: note = source = /note="Description of Artificial Sequence: Synthetic oligonucleotide"
  source 1..23: mol_type = other RNA
aaggcaagaagcaggaacatatt

SEQ ID NO: 2869 - RNA, 21 nt, synthetic construct
  misc_feature 1..21: note = source = /note="Description of Artificial Sequence: Synthetic oligonucleotide"
  source 1..21: mol_type = other RNA
tatgttcctgcttgatgccta

SEQ ID NO: 2870 - RNA, 23 nt, synthetic construct
  misc_feature 1..23: note = source = /note="Description of Artificial Sequence: Synthetic oligonucleotide"
  source 1..23: mol_type = other RNA
aaggcatcaagcaggaacatatt

SEQ ID NO: 2871 - RNA, 21 nt, synthetic construct
  misc_feature 1..21: note = source = /note="Description of Artificial Sequence: Synthetic oligonucleotide"
  source 1..21: mol_type = other RNA
tatgttcctgctacatgccta

SEQ ID NO: 2872 - RNA, 23 nt, synthetic construct
  misc_feature 1..23: note = source = /note="Description of Artificial Sequence: Synthetic oligonucleotide"
  source 1..23: mol_type = other RNA
aaggcatgtagcaggaacatatt

SEQ ID NO: 2873 - RNA, 21 nt, synthetic construct
  misc_feature 1..21: note = source = /note="Description of Artificial Sequence: Synthetic oligonucleotide"
  source 1..21: mol_type = other RNA
tatgttcctgcatcatgccta

SEQ ID NO: 2874 - RNA, 23 nt, synthetic construct
  misc_feature 1..23: note = source = /note="Description of Artificial Sequence: Synthetic oligonucleotide"
  source 1..23: mol_type = other RNA
aaggcatgatgcaggaacatatt

SEQ ID NO: 2875 - RNA, 21 nt, synthetic construct
  misc_feature 1..21: note = source = /note="Description of Artificial Sequence: Synthetic oligonucleotide"
  source 1..21: mol_type = other RNA
tatgttcctggttcatgccta

SEQ ID NO: 2876 - RNA, 23 nt, synthetic construct
  misc_feature 1..23: note = source = /note="Description of Artificial Sequence: Synthetic oligonucleotide"
  source 1..23: mol_type = other RNA
aaggcatgaaccaggaacatatt

SEQ ID NO: 2877 - RNA, 21 nt, synthetic construct
  misc_feature 1..21: note = source = /note="Description of Artificial Sequence: Synthetic oligonucleotide"
  source 1..21: mol_type = other RNA
tatgttcctccttcatgccta

SEQ ID NO: 2878 - RNA, 23 nt, synthetic construct
  misc_feature 1..23: note = source = /note="Description of Artificial Sequence: Synthetic oligonucleotide"
  source 1..23: mol_type = other RNA
aaggcatgaaggaggaacatatt

SEQ ID NO: 2879 - RNA, 21 nt, synthetic construct
  misc_feature 1..21: note = source = /note="Description of Artificial Sequence: Synthetic oligonucleotide"
  source 1..21: mol_type = other RNA
tatgttccagcttcatgccta

SEQ ID NO: 2880 - RNA, 23 nt, synthetic construct
  misc_feature 1..23: note = source = /note="Description of Artificial Sequence: Synthetic oligonucleotide"
  source 1..23: mol_type = other RNA
aaggcatgaagctggaacatatt

SEQ ID NO: 2881 - RNA, 21 nt, synthetic construct
  misc_feature 1..21: note = source = /note="Description of Artificial Sequence: Synthetic oligonucleotide"
  source 1..21: mol_type = other RNA
tatgttcgtgcttcatgccta

SEQ ID NO: 2882 - RNA, 23 nt, synthetic construct
  misc_feature 1..23: note = source = /note="Description of Artificial Sequence: Synthetic oligonucleotide"
  source 1..23: mol_type = other RNA
aaggcatgaagcacgaacatatt

SEQ ID NO: 2883 - RNA, 21 nt, synthetic construct
  misc_feature 1..21: note = source = /note="Description of Artificial Sequence: Synthetic oligonucleotide"
  source 1..21: mol_type = other RNA
tatgttgctgcttcatgccta

SEQ ID NO: 2884 - RNA, 23 nt, synthetic construct
  misc_feature 1..23: note = source = /note="Description of Artificial Sequence: Synthetic oligonucleotide"
  source 1..23: mol_type = other RNA
aaggcatgaagcagcaacatatt

SEQ ID NO: 2885 - RNA, 21 nt, synthetic construct
  misc_feature 1..21: note = source = /note="Description of Artificial Sequence: Synthetic oligonucleotide"
  source 1..21: mol_type = other RNA
tatgtacctgcttcatgccta

SEQ ID NO: 2886 - RNA, 23 nt, synthetic construct
  misc_feature 1..23: note = source = /note="Description of Artificial Sequence: Synthetic oligonucleotide"
  source 1..23: mol_type = other RNA
aaggcatgaagcaggtacatatt

SEQ ID NO: 2887 - RNA, 21 nt, synthetic construct
  misc_feature 1..21: note = source = /note="Description of Artificial Sequence: Synthetic oligonucleotide"
  source 1..21: mol_type = other RNA
tatgatcctgcttcatgccta

SEQ ID NO: 2888 - RNA, 23 nt, synthetic construct
  misc_feature 1..23: note = source = /note="Description of Artificial Sequence: Synthetic oligonucleotide"
  source 1..23: mol_type = other RNA
aaggcatgaagcaggatcatatt

SEQ ID NO: 2889 - RNA, 21 nt, synthetic construct
  misc_feature 1..21: note = source = /note="Description of Artificial Sequence: Synthetic oligonucleotide"
  source 1..21: mol_type = other RNA
tatcttcctgcttcatgccta

SEQ ID NO: 2890 - RNA, 23 nt, synthetic construct
  misc_feature 1..23: note = source = /note="Description of Artificial Sequence: Synthetic oligonucleotide"
  source 1..23: mol_type = other RNA
aaggcatgaagcaggaagatatt

SEQ ID NO: 2891 - RNA, 21 nt, synthetic construct
  misc_feature 1..21: note = source = /note="Description of Artificial Sequence: Synthetic oligonucleotide"
  source 1..21: mol_type = other RNA
taagttcctgcttcatgccta

SEQ ID NO: 2892 - RNA, 23 nt, synthetic construct
  misc_feature 1..23: note = source = /note="Description of Artificial Sequence: Synthetic oligonucleotide"
  source 1..23: mol_type = other RNA
aaggcatgaagcaggaacttatt

SEQ ID NO: 2893 - RNA, 21 nt, synthetic construct
  misc_feature 1..21: note = source = /note="Description of Artificial Sequence: Synthetic oligonucleotide"
  source 1..21: mol_type = other RNA
tttgttcctgcttcatgccta

SEQ ID NO: 2894 - RNA, 23 nt, synthetic construct
  misc_feature 1..23: note = source = /note="Description of Artificial Sequence: Synthetic oligonucleotide"
  source 1..23: mol_type = other RNA
aaggcatgaagcaggaacaaatt

SEQ ID NO: 2895 - RNA, 21 nt, synthetic construct
  misc_feature 1..21: note = source = /note="Description of Artificial Sequence: Synthetic oligonucleotide"
  source 1..21: mol_type = other RNA
aatgttcctgcttcatgccta

SEQ ID NO: 2896 - RNA, 23 nt, synthetic construct
  misc_feature 1..23: note = source = /note="Description of Artificial Sequence: Synthetic oligonucleotide"
  source 1..23: mol_type = other RNA
aaggcatgaagcaggaacatttt

SEQ ID NO: 2897 - RNA, 21 nt, synthetic construct
  misc_feature 1..21: note = source = /note="Description of Artificial Sequence: Synthetic oligonucleotide"
  source 1..21: mol_type = other RNA
tcatgcctttctacagtggca

SEQ ID NO: 2898 - RNA, 23 nt, synthetic construct
  misc_feature 1..23: note = source = /note="Description of Artificial Sequence: Synthetic oligonucleotide"
  source 1..23: mol_type = other RNA
agccactgtagaaaggcatgatt

SEQ ID NO: 2899 - RNA, 21 nt, synthetic construct
  misc_feature 1..21: note = source = /note="Description of Artificial Sequence: Synthetic oligonucleotide"
  source 1..21: mol_type = other RNA
tcatgcctttctacagtggga

SEQ ID NO: 2900 - RNA, 23 nt, synthetic construct
  misc_feature 1..23: note = source = /note="Description of Artificial Sequence: Synthetic oligonucleotide"
  source 1..23: mol_type = other RNA
acccactgtagaaaggcatgatt

SEQ ID NO: 2901 - RNA, 21 nt, synthetic construct
  misc_feature 1..21: note = source = /note="Description of Artificial Sequence: Synthetic oligonucleotide"
  source 1..21: mol_type = other RNA
tcatgcctttctacagtgcca

SEQ ID NO: 2902 - RNA, 23 nt, synthetic construct
  misc_feature 1..23: note = source = /note="Description of Artificial Sequence: Synthetic oligonucleotide"
  source 1..23: mol_type = other RNA
aggcactgtagaaaggcatgatt

SEQ ID NO: 2903 - RNA, 21 nt, synthetic construct
  misc_feature 1..21: note = source = /note="Description of Artificial Sequence: Synthetic oligonucleotide"
  source 1..21: mol_type = other RNA
tcatgcctttctacagtcgca

SEQ ID NO: 2904 - RNA, 23 nt, synthetic construct
  misc_feature 1..23: note = source = /note="Description of Artificial Sequence: Synthetic oligonucleotide"
  source 1..23: mol_type = other RNA
agcgactgtagaaaggcatgatt

SEQ ID NO: 2905 - RNA, 21 nt, synthetic construct
  misc_feature 1..21: note = source = /note="Description of Artificial Sequence: Synthetic oligonucleotide"
  source 1..21: mol_type = other RNA
tcatgcctttctacagaggca

SEQ ID NO: 2906 - RNA, 23 nt, synthetic construct
  misc_feature 1..23: note = source = /note="Description of Artificial Sequence: Synthetic oligonucleotide"
  source 1..23: mol_type = other RNA
agcctctgtagaaaggcatgatt

SEQ ID NO: 2907 - RNA, 21 nt, synthetic construct
  misc_feature 1..21: note = source = /note="Description of Artificial Sequence: Synthetic oligonucleotide"
  source 1..21: mol_type = other RNA
tcatgcctttctacactggca

SEQ ID NO: 2908 - RNA, 23 nt, synthetic construct
  misc_feature 1..23: note = source = /note="Description of Artificial Sequence: Synthetic oligonucleotide"
  source 1..23: mol_type = other RNA
agccagtgtagaaaggcatgatt

SEQ ID NO: 2909 - RNA, 21 nt, synthetic construct
  misc_feature 1..21: note = source = /note="Description of Artificial Sequence: Synthetic oligonucleotide"
  source 1..21: mol_type = other RNA
tcatgcctttctactgtggca

SEQ ID NO: 2910 - RNA, 23 nt, synthetic construct
  misc_feature 1..23: note = source = /note="Description of Artificial Sequence: Synthetic oligonucleotide"
  source 1..23: mol_type = other RNA
agccacagtagaaaggcatgatt

SEQ ID NO: 2911 - RNA, 21 nt, synthetic construct
  misc_feature 1..21: note = source = /note="Description of Artificial Sequence: Synthetic oligonucleotide"
  source 1..21: mol_type = other RNA
tcatgcctttctagagtggca

SEQ ID NO: 2912 - RNA, 23 nt, synthetic construct
  misc_feature 1..23: note = source = /note="Description of Artificial Sequence: Synthetic oligonucleotide"
  source 1..23: mol_type = other RNA
agccactctagaaaggcatgatt

SEQ ID NO: 2913 - RNA, 21 nt, synthetic construct
  misc_feature 1..21: note = source = /note="Description of Artificial Sequence: Synthetic oligonucleotide"
  source 1..21: mol_type = other RNA
tcatgcctttcttcagtggca

SEQ ID NO: 2914 - RNA, 23 nt, synthetic construct
  misc_feature 1..23: note = source = /note="Description of Artificial Sequence: Synthetic oligonucleotide"
  source 1..23: mol_type = other RNA
agccactgaagaaaggcatgatt

SEQ ID NO: 2915 - RNA, 21 nt, synthetic construct
  misc_feature 1..21: note = source = /note="Description of Artificial Sequence: Synthetic oligonucleotide"
  source 1..21: mol_type = other RNA
tcatgcctttcaacagtggca

SEQ ID NO: 2916 - RNA, 23 nt, synthetic construct
  misc_feature 1..23: note = source = /note="Description of Artificial Sequence: Synthetic oligonucleotide"
  source 1..23: mol_type = other RNA
agccactgttgaaaggcatgatt

SEQ ID NO: 2917 - RNA, 21 nt, synthetic construct
  misc_feature 1..21: note = source = /note="Description of Artificial Sequence: Synthetic oligonucleotide"
  source 1..21: mol_type = other RNA
tcatgcctttgtacagtggca

SEQ ID NO: 2918 - RNA, 23 nt, synthetic construct
  misc_feature 1..23: note = source = /note="Description of Artificial Sequence: Synthetic oligonucleotide"
  source 1..23: mol_type = other RNA
agccactgtacaaaggcatgatt

SEQ ID NO: 2919 - RNA, 21 nt, synthetic construct
  misc_feature 1..21: note = source = /note="Description of Artificial Sequence: Synthetic oligonucleotide"
  source 1..21: mol_type = other RNA
tcatgcctatctacagtggca

SEQ ID NO: 2920 - RNA, 23 nt, synthetic construct
  misc_feature 1..23: note = source = /note="Description of Artificial Sequence: Synthetic oligonucleotide"
  source 1..23: mol_type = other RNA
agccactgtagataggcatgatt

SEQ ID NO: 2921 - RNA, 21 nt, synthetic construct
  misc_feature 1..21: note = source = /note="Description of Artificial Sequence: Synthetic oligonucleotide"
  source 1..21: mol_type = other RNA
tcatgcgtttctacagtggca

SEQ ID NO: 2922 - RNA, 23 nt, synthetic construct
  misc_feature 1..23: note = source = /note="Description of Artificial Sequence: Synthetic oligonucleotide"
  source 1..23: mol_type = other RNA
agccactgtagaaacgcatgatt

SEQ ID NO: 2923 - RNA, 21 nt, synthetic construct
  misc_feature 1..21: note = source = /note="Description of Artificial Sequence: Synthetic oligonucleotide"
  source 1..21: mol_type = other RNA
tcatggctttctacagtggca

SEQ ID NO: 2924 - RNA, 23 nt, synthetic construct
  misc_feature 1..23: note = source = /note="Description of Artificial Sequence: Synthetic oligonucleotide"
  source 1..23: mol_type = other RNA
agccactgtagaaagccatgatt

SEQ ID NO: 2925 - RNA, 21 nt, synthetic construct
  misc_feature 1..21: note = source = /note="Description of Artificial Sequence: Synthetic oligonucleotide"
  source 1..21: mol_type = other RNA
tcaagcctttctacagtggca

SEQ ID NO: 2926 - RNA, 23 nt, synthetic construct
  misc_feature 1..23: note = source = /note="Description of Artificial Sequence: Synthetic oligonucleotide"
  source 1..23: mol_type = other RNA
agccactgtagaaaggcttgatt

SEQ ID NO: 2927 - RNA, 21 nt, synthetic construct
  misc_feature 1..21: note = source = /note="Description of Artificial Sequence: Synthetic oligonucleotide"
  source 1..21: mol_type = other RNA
tcttgcctttctacagtggca

SEQ ID NO: 2928 - RNA, 23 nt, synthetic construct
  misc_feature 1..23: note = source = /note="Description of Artificial Sequence: Synthetic oligonucleotide"
  source 1..23: mol_type = other RNA
agccactgtagaaaggcaagatt

SEQ ID NO: 2929 - RNA, 21 nt, synthetic construct
  misc_feature 1..21: note = source = /note="Description of Artificial Sequence: Synthetic oligonucleotide"
  source 1..21: mol_type = other RNA
tgatgcctttctacagtggca

SEQ ID NO: 2930 - RNA, 23 nt, synthetic construct
  misc_feature 1..23: note = source = /note="Description of Artificial Sequence: Synthetic oligonucleotide"
  source 1..23: mol_type = other RNA
agccactgtagaaaggcatcatt

SEQ ID NO: 2931 - RNA, 21 nt, synthetic construct
  misc_feature 1..21: note = source = /note="Description of Artificial Sequence: Synthetic oligonucleotide"
  source 1..21: mol_type = other RNA
acatgcctttctacagtggca

SEQ ID NO: 2932 - RNA, 23 nt, synthetic construct
  misc_feature 1..23: note = source = /note="Description of Artificial Sequence: Synthetic oligonucleotide"
  source 1..23: mol_type = other RNA
agccactgtagaaaggcatgttt

SEQ ID NO: 2933 - RNA, 21 nt, synthetic construct
  misc_feature 1..21: note = source = /note="Description of Artificial Sequence: Synthetic oligonucleotide"
  source 1..21: mol_type = other RNA
tcatgccttactacagtggca

SEQ ID NO: 2934 - RNA, 23 nt, synthetic construct
  misc_feature 1..23: note = source = /note="Description of Artificial Sequence: Synthetic oligonucleotide"
  source 1..23: mol_type = other RNA
agccactgtagtaaggcatgatt

SEQ ID NO: 2935 - RNA, 21 nt, synthetic construct
  misc_feature 1..21: note = source = /note="Description of Artificial Sequence: Synthetic oligonucleotide"
  source 1..21: mol_type = other RNA
atgcctttctacagtggctta

SEQ ID NO: 2936 - RNA, 21 nt, synthetic construct
  misc_feature 1..21: note = source = /note="Description of Artificial Sequence: Synthetic oligonucleotide"
  source 1..21: mol_type = other RNA
agccactgtagaaaggcattt

SEQ ID NO: 2937 - RNA, 19 nt, synthetic construct
  misc_feature 1..19: note = source = /note="Description of Artificial Sequence: Synthetic oligonucleotide"
  source 1..19: mol_type = other RNA
atgcctttctacagtggca

SEQ ID NO: 2938 - RNA, 21 nt, synthetic construct
  misc_feature 1..21: note = source = /note="Description of Artificial Sequence: Synthetic oligonucleotide"
  source 1..21: mol_type = other RNA
agccactgtagaaaggcattt

SEQ ID NO: 2939 - RNA, 21 nt, synthetic construct
  misc_feature 1..21: note = source = /note="Description of Artificial Sequence: Synthetic oligonucleotide"
  source 1..21: mol_type = other RNA
tcatgcctttctacagtggca

SEQ ID NO: 2940 - RNA, 23 nt, synthetic construct
  misc_feature 1..23: note = source = /note="Description of Artificial Sequence: Synthetic oligonucleotide"
  source 1..23: mol_type = other RNA
agccactgtagaaaggcatgatt

SEQ ID NO: 2941 - RNA, 20 nt, synthetic construct
  misc_feature 1..20: note = source = /note="Description of Artificial Sequence: Synthetic oligonucleotide"
  source 1..20: mol_type = other RNA
aatgcctttctacagtggct

SEQ ID NO: 2942 - RNA, 21 nt, synthetic construct
  misc_feature 1..21: note = source = /note="Description of Artificial Sequence: Synthetic oligonucleotide"
  source 1..21: mol_type = other RNA
agccactgtagaaaggcattt

SEQ ID NO: 2943 - RNA, 22 nt, synthetic construct
  misc_feature 1..22: note = source = /note="Description of Artificial Sequence: Synthetic oligonucleotide"
  source 1..22: mol_type = other RNA
tcatgcctttctacagtggcta

SEQ ID NO: 2944 - RNA, 23 nt, synthetic construct
  misc_feature 1..23: note = source = /note="Description of Artificial Sequence: Synthetic oligonucleotide"
  source 1..23: mol_type = other RNA
agccactgtagaaaggcatgatt

SEQ ID NO: 2945 - RNA, 21 nt, synthetic construct
  misc_feature 1..21: note = source = /note="Description of Artificial Sequence: Synthetic oligonucleotide"
  source 1..21: mol_type = other RNA
tcatgcctttctacagtggca

SEQ ID NO: 2946 - RNA, 23 nt, synthetic construct
  misc_feature 1..23: note = source = /note="Description of Artificial Sequence: Synthetic oligonucleotide"
  source 1..23: mol_type = other RNA
agccactgtagaaaggcatgaag

SEQ ID NO: 2947 - RNA, 22 nt, synthetic construct
  misc_feature 1..22: note = source = /note="Description of Artificial Sequence: Synthetic oligonucleotide"
  source 1..22: mol_type = other RNA
tcatgcctttctacagtggcta

SEQ ID NO: 2948 - RNA, 23 nt, synthetic construct
  misc_feature 1..23: note = source = /note="Description of Artificial Sequence: Synthetic oligonucleotide"
  source 1..23: mol_type = other RNA
agccactgtagaaaggcatgaag

SEQ ID NO: 2949 - RNA, 22 nt, synthetic construct
  misc_feature 1..22: note = source = /note="Description of Artificial Sequence: Synthetic oligonucleotide"
  source 1..22: mol_type = other RNA
tcatgcctttctacagtggcta

SEQ ID NO: 2950 - RNA, 23 nt, synthetic construct
  misc_feature 1..23: note = source = /note="Description of Artificial Sequence: Synthetic oligonucleotide"
  source 1..23: mol_type = other RNA
agccactgtagaaaggcatgatt

SEQ ID NO: 2951 - RNA, 21 nt, synthetic construct
  misc_feature 1..21: note = source = /note="Description of Artificial Sequence: Synthetic oligonucleotide"
  source 1..21: mol_type = other RNA
tcatgcctttctacagtggca

SEQ ID NO: 2952 - RNA, 23 nt, synthetic construct
  misc_feature 1..23: note = source = /note="Description of Artificial Sequence: Synthetic oligonucleotide"
  source 1..23: mol_type = other RNA
agccactgtagaaaggcatgaag

SEQ ID NO: 2953 - RNA, 22 nt, synthetic construct
  misc_feature 1..22: note = source = /note="Description of Artificial Sequence: Synthetic oligonucleotide"
  source 1..22: mol_type = other RNA
tcatgcctttctacagtggcta

SEQ ID NO: 2954 - RNA, 23 nt, synthetic construct
  misc_feature 1..23: note = source = /note="Description of Artificial Sequence: Synthetic oligonucleotide"
  source 1..23: mol_type = other RNA
agccactgtagaaaggcatgaag

SEQ ID NO: 2955 - RNA, 21 nt, synthetic construct
  misc_feature 1..21: note = source = /note="Description of Artificial Sequence: Synthetic oligonucleotide"
  source 1..21: mol_type = other RNA
ctgcttcatgcctttctacaa

SEQ ID NO: 2956 - RNA, 23 nt, synthetic construct
  modified_base 6: mod_base = OTHER; note = Inosine
  misc_feature 1..23: note = source = /note="Description of Artificial Sequence: Synthetic oligonucleotide"
  source 1..23: mol_type = other RNA
atgtanaaaggcatgaagcagtt

SEQ ID NO: 2957 - RNA, 21 nt, synthetic construct
  misc_feature 1..21: note = source = /note="Description of Artificial Sequence: Synthetic oligonucleotide"
  source 1..21: mol_type = other RNA
gcggcttcgacggcttctatt

SEQ ID NO: 2958 - RNA, 21 nt, synthetic construct
  misc_feature 1..21: note = source = /note="Description of Artificial Sequence: Synthetic oligonucleotide"
  source 1..21: mol_type = other RNA
tagaagccgtcgaagccgctt

SEQ ID NO: 2959 - RNA, 21 nt, synthetic construct
  misc_feature 1..21: note = source = /note="Description of Artificial Sequence: Synthetic oligonucleotide"
  source 1..21: mol_type = other RNA
gcggcttcgacgggttctatt

SEQ ID NO: 2960 - RNA, 21 nt, synthetic construct
  misc_feature 1..21: note = source = /note="Description of Artificial Sequence: Synthetic oligonucleotide"
  source 1..21: mol_type = other RNA
tagaacccgtcgaagccgctt

SEQ ID NO: 2961 - RNA, 21 nt, synthetic construct
  misc_feature 1..21: note = source = /note="Description of Artificial Sequence: Synthetic oligonucleotide"
  source 1..21: mol_type = other RNA
gcggcttcgacgccttctatt

SEQ ID NO: 2962 - RNA, 21 nt, synthetic construct
  misc_feature 1..21: note = source = /note="Description of Artificial Sequence: Synthetic oligonucleotide"
  source 1..21: mol_type = other RNA
tagaaggcgtcgaagccgctt

SEQ ID NO: 2963 - RNA, 21 nt, synthetic construct
  misc_feature 1..21: note = source = /note="Description of Artificial Sequence: Synthetic oligonucleotide"
  source 1..21: mol_type = other RNA
gcggcttcgaccgcttctatt

SEQ ID NO: 2964 - RNA, 21 nt, synthetic construct
  misc_feature 1..21: note = source = /note="Description of Artificial Sequence: Synthetic oligonucleotide"
  source 1..21: mol_type = other RNA
tagaagcggtcgaagccgctt

SEQ ID NO: 2965 - RNA, 21 nt, synthetic construct
  misc_feature 1..21: note = source = /note="Description of Artificial Sequence: Synthetic oligonucleotide"
  source 1..21: mol_type = other RNA
gcggcttcctgggcttctatt

SEQ ID NO: 2966 - RNA, 22 nt, synthetic construct
  misc_feature 1..22: note = source = /note="Description of Artificial Sequence: Synthetic oligonucleotide"
  source 1..22: mol_type = other RNA
atagaagcccaggaagccgctt

SEQ ID NO: 2967 - RNA, 22 nt, synthetic construct
  misc_feature 1..22: note = source = /note="Description of Artificial Sequence: Synthetic oligonucleotide"
  source 1..22: mol_type = other RNA
agcttcatgggattgtacattt

SEQ ID NO: 2968 - RNA, 21 nt, synthetic construct
  misc_feature 1..21: note = source = /note="Description of Artificial Sequence: Synthetic oligonucleotide"
  source 1..21: mol_type = other RNA
atgtacaatcccatgaagctt

SEQ ID NO: 2969 - RNA, 21 nt, synthetic construct
  misc_feature 1..21: note = source = /note="Description of Artificial Sequence: Synthetic oligonucleotide"
  source 1..21: mol_type = other RNA
tcatgcctttgatcactggca

SEQ ID NO: 2970 - RNA, 23 nt, synthetic construct
  misc_feature 1..23: note = source = /note="Description of Artificial Sequence: Synthetic oligonucleotide"
  source 1..23: mol_type = other RNA
agccagtgatcaaaggcatgatt

SEQ ID NO: 2971 - RNA, 21 nt, synthetic construct
  misc_feature 1..21: note = source = /note="Description of Artificial Sequence: Synthetic oligonucleotide"
  source 1..21: mol_type = other RNA
gcggcttcctgggcttctatt

SEQ ID NO: 2972 - RNA, 21 nt, synthetic construct
  misc_feature 1..21: note = source = /note="Description of Artificial Sequence: Synthetic oligonucleotide"
  source 1..21: mol_type = other RNA
tagaagcccaggaagccgctt

SEQ ID NO: 2973 - RNA, 21 nt, synthetic construct
  misc_feature 1..21: note = source = /note="Description of Artificial Sequence: Synthetic oligonucleotide"
  source 1..21: mol_type = other RNA
tgcttcatgcctttctacaga

SEQ ID NO: 2974 - RNA, 23 nt, synthetic construct
  misc_feature 1..23: note = source = /note="Description of Artificial Sequence: Synthetic oligonucleotide"
  source 1..23: mol_type = other RNA
actgtagaaaggcatgaagcatt

SEQ ID NO: 2975 - RNA, 21 nt, synthetic construct
  misc_feature 1..21: note = source = /note="Description of Artificial Sequence: Synthetic oligonucleotide"
  source 1..21: mol_type = other RNA
tcatgcctttctacagtggca

SEQ ID NO: 2976 - RNA, 23 nt, synthetic construct
  misc_feature 1..23: note = source = /note="Description of Artificial Sequence: Synthetic oligonucleotide"
  source 1..23: mol_type = other RNA
agccactgtagaaaggcatgatt

SEQ ID NO: 2977 - RNA, 21 nt, synthetic construct
  misc_feature 1..21: note = source = /note="Description of Artificial Sequence: Synthetic oligonucleotide"
  source 1..21: mol_type = other RNA
ctgcttcatgcctttctacaa

SEQ ID NO: 2978 - RNA, 23 nt, synthetic construct
  misc_feature 1..23: note = source = /note="Description of Artificial Sequence: Synthetic oligonucleotide"
  source 1..23: mol_type = other RNA
atgtagaaaggcatgaagcagtt

SEQ ID NO: 2979 - RNA, 21 nt, synthetic construct
  misc_feature 1..21: note = source = /note="Description of Artificial Sequence: Synthetic oligonucleotide"
  source 1..21: mol_type = other RNA
ctgcttcatgcctttctacaa

SEQ ID NO: 2980 - RNA, 23 nt, synthetic construct
  misc_feature 1..23: note = source = /note="Description of Artificial Sequence: Synthetic oligonucleotide"
  source 1..23: mol_type = other RNA
atgtagaaaggcatgaagcagtt

SEQ ID NO: 2981 - RNA, 21 nt, synthetic construct
  misc_feature 1..21: note = source = /note="Description of Artificial Sequence: Synthetic oligonucleotide"
  source 1..21: mol_type = other RNA
ctgcttcatgcctttctacaa

SEQ ID NO: 2982 - RNA, 23 nt, synthetic construct
  misc_feature 1..23: note = source = /note="Description of Artificial Sequence: Synthetic oligonucleotide"
  source 1..23: mol_type = other RNA
atgtagaaaggcatgaagcagtt

SEQ ID NO: 2983 - RNA, 21 nt, synthetic construct
  misc_feature 1..21: note = source = /note="Description of Artificial Sequence: Synthetic oligonucleotide"
  source 1..21: mol_type = other RNA
tcatgcctttctacagtggca

SEQ ID NO: 2984 - RNA, 23 nt, synthetic construct
  misc_feature 1..23: note = source = /note="Description of Artificial Sequence: Synthetic oligonucleotide"
  source 1..23: mol_type = other RNA
tgccactgtagaaaggcatgatt

SEQ ID NO: 2985 - RNA, 21 nt, synthetic construct
  misc_feature 1..21: note = source = /note="Description of Artificial Sequence: Synthetic oligonucleotide"
  source 1..21: mol_type = other RNA
ctgcttcatgcctttctacaa

SEQ ID NO: 2986 - RNA, 23 nt, synthetic construct
  misc_feature 1..23: note = source = /note="Description of Artificial Sequence: Synthetic oligonucleotide"
  source 1..23: mol_type = other RNA
atgtagaaaggcatgaagcagtt

SEQ ID NO: 2987 - RNA, 21 nt, synthetic construct
  misc_feature 1..21: note = source = /note="Description of Artificial Sequence: Synthetic oligonucleotide"
  source 1..21: mol_type = other RNA
tgcttcatgcctttctacaga

SEQ ID NO: 2988 - RNA, 23 nt, synthetic construct
  misc_feature 1..23: note = source = /note="Description of Artificial Sequence: Synthetic oligonucleotide"
  source 1..23: mol_type = other RNA
tctgtagaaaggcatgaagcatt

SEQ ID NO: 2989 - DNA, 21 bp, synthetic construct
  misc_feature 1..21: note = source = /note="Description of Artificial Sequence: Synthetic oligonucleotide"
  misc_feature 1..21: note = source = /note="Description of Combined DNA/RNA Molecule: Synthetic oligonucleotide"
  source 1..21: mol_type = other DNA
ctgcttcatgcctttctacat

SEQ ID NO: 2990 - RNA, 23 nt, synthetic construct
  misc_feature 1..23: note = source = /note="Description of Artificial Sequence: Synthetic oligonucleotide"
  source 1..23: mol_type = other RNA
atgtagaaaggcatgaagcagtt

SEQ ID NO: 2991 - RNA, 21 nt, synthetic construct
  modified_base 21: mod_base = OTHER; note = Inverted abasic nucleotide
  misc_feature 1..21: note = source = /note="Description of Artificial Sequence: Synthetic oligonucleotide"
  source 1..21: mol_type = other RNA
ctgcttcatgcctttctacan

SEQ ID NO: 2992 - RNA, 23 nt, synthetic construct
  misc_feature 1..23: note = source = /note="Description of Artificial Sequence: Synthetic oligonucleotide"
  source 1..23: mol_type = other RNA
atgtagaaaggcatgaagcagtt

SEQ ID NO: 2993 - RNA, 21 nt, synthetic construct
  modified_base 21: mod_base = OTHER; note = Inverted abasic nucleotide
  misc_feature 1..21: note = source = /note="Description of Artificial Sequence: Synthetic oligonucleotide"
  source 1..21: mol_type = other RNA
ctgcttcatgcctttctacan

SEQ ID NO: 2994 - RNA, 23 nt, synthetic construct
  modified_base 3: mod_base = OTHER; note = Abasic nucleotide
  misc_feature 1..23: note = source = /note="Description of Artificial Sequence: Synthetic oligonucleotide"
  source 1..23: mol_type = other RNA
atntagaaaggcatgaagcagtt

SEQ ID NO: 2995 - RNA, 21 nt, synthetic construct
  misc_feature 1..21: note = source = /note="Description of Artificial Sequence: Synthetic oligonucleotide"
  source 1..21: mol_type = other RNA
tgcttcatgcctttctacaga

SEQ ID NO: 2996 - RNA, 23 nt, synthetic construct
  modified_base 4: mod_base = OTHER; note = Abasic nucleotide
  misc_feature 1..23: note = source = /note="Description of Artificial Sequence: Synthetic oligonucleotide"
  source 1..23: mol_type = other RNA
tctntagaaaggcatgaagcatt

SEQ ID NO: 2997 - RNA, 21 nt, synthetic construct
  misc_feature 1..21: note = source = /note="Description of Artificial Sequence: Synthetic oligonucleotide"
  source 1..21: mol_type = other RNA
tgcttcatgcctttctacaga

SEQ ID NO: 2998 - RNA, 23 nt, synthetic construct
  misc_feature 1..23: note = source = /note="Description of Artificial Sequence: Synthetic oligonucleotide"
  source 1..23: mol_type = other RNA
tctgtagaaaggcatgaagcatt

SEQ ID NO: 2999 - RNA, 21 nt, synthetic construct
  modified_base 21: mod_base = OTHER; note = Inverted abasic nucleotide
  misc_feature 1..21: note = source = /note="Description of Artificial Sequence: Synthetic oligonucleotide"
  source 1..21: mol_type = other RNA
tcatgcctttctacagtggcn

SEQ ID NO: 3000 - RNA, 23 nt, synthetic construct
  modified_base 6: mod_base = OTHER; note = Abasic nucleotide
  misc_feature 1..23: note = source = /note="Description of Artificial Sequence: Synthetic oligonucleotide"
  source 1..23: mol_type = other RNA
agccantgtagaaaggcatgatt

SEQ ID NO: 3001 - RNA, 21 nt, synthetic construct
  modified_base 21: mod_base = OTHER; note = Inverted abasic nucleotide
  misc_feature 1..21: note = source = /note="Description of Artificial Sequence: Synthetic oligonucleotide"
  source 1..21: mol_type = other RNA
tcatgcctttctacagtggcn

SEQ ID NO: 3002 - RNA, 23 nt, synthetic construct
  modified_base 6: mod_base = OTHER; note = Abasic nucleotide
  misc_feature 1..23: note = source = /note="Description of Artificial Sequence: Synthetic oligonucleotide"
  source 1..23: mol_type = other RNA
agccantgtagaaaggcatgatt

SEQ ID NO: 3003 - RNA, 21 nt, synthetic construct
  modified_base 21: mod_base = OTHER; note = Inverted abasic nucleotide
  misc_feature 1..21: note = source = /note="Description of Artificial Sequence: Synthetic oligonucleotide"
  source 1..21: mol_type = other RNA
tcatgcctttctacagtggcn

SEQ ID NO: 3004 - RNA, 23 nt, synthetic construct
  modified_base 6: mod_base = OTHER; note = Abasic nucleotide
  misc_feature 1..23: note = source = /note="Description of Artificial Sequence: Synthetic oligonucleotide"
  source 1..23: mol_type = other RNA
agccantgtagaaaggcatgatt

SEQ ID NO: 3005 - RNA, 21 nt, synthetic construct
  modified_base 21: mod_base = OTHER; note = Inverted abasic nucleotide
  misc_feature 1..21: note = source = /note="Description of Artificial Sequence: Synthetic oligonucleotide"
  source 1..21: mol_type = other RNA
tcatgcctttctacagtggcn

SEQ ID NO: 3006 - RNA, 23 nt, synthetic construct
  modified_base 6: mod_base = OTHER; note = Abasic nucleotide
  misc_feature 1..23: note = source = /note="Description of Artificial Sequence: Synthetic oligonucleotide"
  source 1..23: mol_type = other RNA
agccantgtagaaaggcatgatt

SEQ ID NO: 3007 - RNA, 21 nt, synthetic construct
  modified_base 21: mod_base = OTHER; note = Inverted abasic nucleotide
  misc_feature 1..21: note = source = /note="Description of Artificial Sequence: Synthetic oligonucleotide"
  source 1..21: mol_type = other RNA
ctgcttcatgcctttctacan

SEQ ID NO: 3008 - RNA, 23 nt, synthetic construct
  modified_base 2: mod_base = OTHER; note = Inosine
  misc_feature 1..23: note = source = /note="Description of Artificial Sequence: Synthetic oligonucleotide"
  source 1..23: mol_type = other RNA
angtagaaaggcatgaagcagtt

SEQ ID NO: 3009 - RNA, 21 nt, synthetic construct
  modified_base 21: mod_base = OTHER; note = Inverted abasic nucleotide
  misc_feature 1..21: note = source = /note="Description of Artificial Sequence: Synthetic oligonucleotide"
  source 1..21: mol_type = other RNA
ctgcttcatgcctttctacan

SEQ ID NO: 3010 - RNA, 23 nt, synthetic construct
  modified_base 4: mod_base = OTHER; note = Inosine
  misc_feature 1..23: note = source = /note="Description of Artificial Sequence: Synthetic oligonucleotide"
  source 1..23: mol_type = other RNA
atgnagaaaggcatgaagcagtt

SEQ ID NO: 3011 - RNA, 21 nt, synthetic construct
  modified_base 21: mod_base = OTHER; note = Inverted abasic nucleotide
  misc_feature 1..21: note = source = /note="Description of Artificial Sequence: Synthetic oligonucleotide"
  source 1..21: mol_type = other RNA
ctgcttcatgcctttctacan

SEQ ID NO: 3012 - RNA, 23 nt, synthetic construct
  modified_base 5: mod_base = OTHER; note = Inosine
  misc_feature 1..23: note = source = /note="Description of Artificial Sequence: Synthetic oligonucleotide"
  source 1..23: mol_type = other RNA
atgtngaaaggcatgaagcagtt

SEQ ID NO: 3013 - RNA, 21 nt, synthetic construct
  modified_base 21: mod_base = OTHER; note = Inverted abasic nucleotide
  misc_feature 1..21: note = source = /note="Description of Artificial Sequence: Synthetic oligonucleotide"
  source 1..21: mol_type = other RNA
ctgcttcatgcctttctacan

SEQ ID NO: 3014 - RNA, 23 nt, synthetic construct
  modified_base 6: mod_base = OTHER; note = Inosine
  misc_feature 1..23: note = source = /note="Description of Artificial Sequence: Synthetic oligonucleotide"
  source 1..23: mol_type = other RNA
atgtanaaaggcatgaagcagtt

SEQ ID NO: 3015 - RNA, 21 nt, synthetic construct
  modified_base 21: mod_base = OTHER; note = Inverted abasic nucleotide
  misc_feature 1..21: note = source = /note="Description of Artificial Sequence: Synthetic oligonucleotide"
  source 1..21: mol_type = other RNA
ctgcttcatgcctttctacan

SEQ ID NO: 3016 - RNA, 23 nt, synthetic construct
  modified_base 8: mod_base = OTHER; note = Inosine
  misc_feature 1..23: note = source = /note="Description of Artificial Sequence: Synthetic oligonucleotide"
  source 1..23: mol_type = other RNA
atgtaganaggcatgaagcagtt

SEQ ID NO: 3017 - RNA, 21 nt, synthetic construct
  modified_base 21: mod_base = OTHER; note = Inverted abasic nucleotide
  misc_feature 1..21: note = source = /note="Description of Artificial Sequence: Synthetic oligonucleotide"
  source 1..21: mol_type = other RNA
ctgcttcatgcctttctaccn

SEQ ID NO: 3018 - RNA, 23 nt, synthetic construct
  modified_base 2: mod_base = OTHER; note = Inosine
  misc_feature 1..23: note = source = /note="Description of Artificial Sequence: Synthetic oligonucleotide"
  source 1..23: mol_type = other RNA
angtagaaaggcatgaagcagtt

SEQ ID NO: 3019 - RNA, 21 nt, synthetic construct
  modified_base 21: mod_base = OTHER; note = Inverted abasic nucleotide
  misc_feature 1..21: note = source = /note="Description of Artificial Sequence: Synthetic oligonucleotide"
  source 1..21: mol_type = other RNA
ctgcttcatgcctttctccan

SEQ ID NO: 3020 - RNA, 23 nt, synthetic construct
  modified_base 4: mod_base = OTHER; note = Inosine
  misc_feature 1..23: note = source = /note="Description of Artificial Sequence: Synthetic oligonucleotide"
  source 1..23: mol_type = other RNA
atgnagaaaggcatgaagcagtt

SEQ ID NO: 3021 - RNA, 21 nt, synthetic construct
  modified_base 21: mod_base = OTHER; note = Inverted abasic nucleotide
  misc_feature 1..21: note = source = /note="Description of Artificial Sequence: Synthetic oligonucleotide"
  source 1..21: mol_type = other RNA
ctgcttcatgccttcctacan

SEQ ID NO: 3022 - RNA, 23 nt, synthetic construct
  modified_base 7: mod_base = OTHER; note = Inosine
  misc_feature 1..23: note = source = /note="Description of Artificial Sequence: Synthetic oligonucleotide"
  source 1..23: mol_type = other RNA
atgtagnaaggcatgaagcagtt

SEQ ID NO: 3023 - RNA, 21 nt, synthetic construct
  modified_base 21: mod_base = OTHER; note = Inverted abasic nucleotide
  misc_feature 1..21: note = source = /note="Description of Artificial Sequence: Synthetic oligonucleotide"
  source 1..21: mol_type = other RNA
ctgcttcatgcctctctacan

SEQ ID NO: 3024 - RNA, 23 nt, synthetic construct
  modified_base 8: mod_base = OTHER; note = Inosine
  misc_feature 1..23: note = source = /note="Description of Artificial Sequence: Synthetic oligonucleotide"
  source 1..23: mol_type = other RNA
atgtaganaggcatgaagcagtt

SEQ ID NO: 3025 - RNA, 21 nt, synthetic construct
  modified_base 21: mod_base = OTHER; note = Inverted abasic nucleotide
  misc_feature 1..21: note = source = /note="Description of Artificial Sequence: Synthetic oligonucleotide"
  source 1..21: mol_type = other RNA
ctgcttcatgcctttctactn

SEQ ID NO: 3026 - RNA, 23 nt, synthetic construct
  misc_feature 1..23: note = source = /note="Description of Artificial Sequence: Synthetic oligonucleotide"
  source 1..23: mol_type = other RNA
aagtagaaaggcatgaagcagtt

SEQ ID NO: 3027 - RNA, 21 nt, synthetic construct
  modified_base 21: mod_base = OTHER; note = Inverted abasic nucleotide
  misc_feature 1..21: note = source = /note="Description of Artificial Sequence: Synthetic oligonucleotide"
  source 1..21: mol_type = other RNA
ctgcttcatgcctttcttcan

SEQ ID NO: 3028 - RNA, 23 nt, synthetic construct
  misc_feature 1..23: note = source = /note="Description of Artificial Sequence: Synthetic oligonucleotide"
  source 1..23: mol_type = other RNA
atgaagaaaggcatgaagcagtt

SEQ ID NO: 3029 - RNA, 21 nt, synthetic construct
  modified_base 21: mod_base = OTHER; note = Inverted abasic nucleotide
  misc_feature 1..21: note = source = /note="Description of Artificial Sequence: Synthetic oligonucleotide"
  source 1..21: mol_type = other RNA
ctgcttcatgcctttcaacan

SEQ ID NO: 3030 - RNA, 23 nt, synthetic construct
  misc_feature 1..23: note = source = /note="Description of Artificial Sequence: Synthetic oligonucleotide"
  source 1..23: mol_type = other RNA
atgttgaaaggcatgaagcagtt

SEQ ID NO: 3031 - RNA, 21 nt, synthetic construct
  modified_base 21: mod_base = OTHER; note = Inverted abasic nucleotide
  misc_feature 1..21: note = source = /note="Description of Artificial Sequence: Synthetic oligonucleotide"
  source 1..21: mol_type = other RNA
ctgcttcatgcctatctacan

SEQ ID NO: 3032 - RNA, 23 nt, synthetic construct
  misc_feature 1..23: note = source = /note="Description of Artificial Sequence: Synthetic oligonucleotide"
  source 1..23: mol_type = other RNA
atgtagataggcatgaagcagtt

SEQ ID NO: 3033 - RNA, 21 nt, synthetic construct
  modified_base 21: mod_base = OTHER; note = Inverted abasic nucleotide
  misc_feature 1..21: note = source = /note="Description of Artificial Sequence: Synthetic oligonucleotide"
  source 1..21: mol_type = other RNA
tgcttcatgcctttctacacn

SEQ ID NO: 3034 - RNA, 23 nt, synthetic construct
  modified_base 2: mod_base = OTHER; note = Inosine
  misc_feature 1..23: note = source = /note="Description of Artificial Sequence: Synthetic oligonucleotide"
  source 1..23: mol_type = other RNA
antgtagaaaggcatgaagcatt

SEQ ID NO: 3035 - RNA, 21 nt, synthetic construct
  modified_base 21: mod_base = OTHER; note = Inverted abasic nucleotide
  misc_feature 1..21: note = source = /note="Description of Artificial Sequence: Synthetic oligonucleotide"
  source 1..21: mol_type = other RNA
tgcttcatgcctttctacagn

SEQ ID NO: 3036 - RNA, 23 nt, synthetic construct
  modified_base 3: mod_base = OTHER; note = Inosine
  misc_feature 1..23: note = source = /note="Description of Artificial Sequence: Synthetic oligonucleotide"
  source 1..23: mol_type = other RNA
acngtagaaaggcatgaagcatt

SEQ ID NO: 3037 - RNA, 21 nt, synthetic construct
  modified_base 21: mod_base = OTHER; note = Inverted abasic nucleotide
  misc_feature 1..21: note = source = /note="Description of Artificial Sequence: Synthetic oligonucleotide"
  source 1..21: mol_type = other RNA
tgcttcatgcctttctacagn

SEQ ID NO: 3038 - RNA, 23 nt, synthetic construct
  modified_base 5: mod_base = OTHER; note = Inosine
  misc_feature 1..23: note = source = /note="Description of Artificial Sequence: Synthetic oligonucleotide"
  source 1..23: mol_type = other RNA
actgnagaaaggcatgaagcatt

SEQ ID NO: 3039 - RNA, 21 nt, synthetic construct
  modified_base 21: mod_base = OTHER; note = Inverted abasic nucleotide
  misc_feature 1..21: note = source = /note="Description of Artificial Sequence: Synthetic oligonucleotide"
  source 1..21: mol_type = other RNA
tgcttcatgcctttctacagn

SEQ ID NO: 3040 - RNA, 23 nt, synthetic construct
  modified_base 6: mod_base = OTHER; note = Inosine
  misc_feature 1..23: note = source = /note="Description of Artificial Sequence: Synthetic oligonucleotide"
  source 1..23: mol_type = other RNA
actgtngaaaggcatgaagcatt

SEQ ID NO: 3041 - RNA, 21 nt, synthetic construct
  modified_base 21: mod_base = OTHER; note = Inverted abasic nucleotide
  misc_feature 1..21: note = source = /note="Description of Artificial Sequence: Synthetic oligonucleotide"
  source 1..21: mol_type = other RNA
tgcttcatgcctttctacagn

SEQ ID NO: 3042 - RNA, 23 nt, synthetic construct
  modified_base 7: mod_base = OTHER; note = Inosine
  misc_feature 1..23: note = source = /note="Description of Artificial Sequence: Synthetic oligonucleotide"
  source 1..23: mol_type = other RNA
actgtanaaaggcatgaagcatt

SEQ ID NO: 3043 - RNA, 21 nt, synthetic construct
  modified_base 21: mod_base = OTHER; note = Inverted abasic nucleotide
  misc_feature 1..21: note = source = /note="Description of Artificial Sequence: Synthetic oligonucleotide"
  source 1..21: mol_type = other RNA
tgcttcatgcctttctaccgn

SEQ ID NO: 3044 - RNA, 23 nt, synthetic construct
  modified_base 3: mod_base = OTHER; note = Inosine
  misc_feature 1..23: note = source = /note="Description of Artificial Sequence: Synthetic oligonucleotide"
  source 1..23: mol_type = other RNA
acngtagaaaggcatgaagcatt

SEQ ID NO: 3045 - RNA, 21 nt, synthetic construct
  modified_base 21: mod_base = OTHER; note = Inverted abasic nucleotide
  misc_feature 1..21: note = source = /note="Description of Artificial Sequence: Synthetic oligonucleotide"
  source 1..21: mol_type = other RNA
tgcttcatgcctttctccagn

SEQ ID NO: 3046 - RNA, 23 nt, synthetic construct
  modified_base 5: mod_base = OTHER; note = Inosine
  misc_feature 1..23: note = source = /note="Description of Artificial Sequence: Synthetic oligonucleotide"
  source 1..23: mol_type = other RNA
actgnagaaaggcatgaagcatt

SEQ ID NO: 3047 - RNA, 21 nt, synthetic construct
  modified_base 21: mod_base = OTHER; note = Inverted abasic nucleotide
  misc_feature 1..21: note = source = /note="Description of Artificial Sequence: Synthetic oligonucleotide"
  source 1..21: mol_type = other RNA
tgcttcatgcctttccacagn

SEQ ID NO: 3048 - RNA, 23 nt, synthetic construct
  modified_base 6: mod_base = OTHER; note = Inosine
  misc_feature 1..23: note = source = /note="Description of Artificial Sequence: Synthetic oligonucleotide"
  source 1..23: mol_type = other RNA
actgtngaaaggcatgaagcatt

SEQ ID NO: 3049 - RNA, 21 nt, synthetic construct
  modified_base 21: mod_base = OTHER; note = Inverted abasic nucleotide
  misc_feature 1..21: note = source = /note="Description of Artificial Sequence: Synthetic oligonucleotide"
  source 1..21: mol_type = other RNA
ctgcttcatgcctttctaaan

SEQ ID NO: 3050 - RNA, 23 nt, synthetic construct
  misc_feature 1..23: note = source = /note="Description of Artificial Sequence: Synthetic oligonucleotide"
  source 1..23: mol_type = other RNA
atttagaaaggcatgaagcagtt

SEQ ID NO: 3051 - RNA, 21 nt, synthetic construct
  modified_base 21: mod_base = OTHER; note = Inverted abasic nucleotide
  misc_feature 1..21: note = source = /note="Description of Artificial Sequence: Synthetic oligonucleotide"
  source 1..21: mol_type = other RNA
ctgcttcatgcctttatacan

SEQ ID NO: 3052 - RNA, 23 nt, synthetic construct
  misc_feature 1..23: note = source = /note="Description of Artificial Sequence: Synthetic oligonucleotide"
  source 1..23: mol_type = other RNA
atgtataaaggcatgaagcagtt

SEQ ID NO: 3053 - RNA, 21 nt, synthetic construct
  modified_base 21: mod_base = OTHER; note = Inverted abasic nucleotide
  misc_feature 1..21: note = source = /note="Description of Artificial Sequence: Synthetic oligonucleotide"
  source 1..21: mol_type = other RNA
ctgcttcatgcctttctacan

SEQ ID NO: 3054 - RNA, 23 nt, synthetic construct
  misc_feature 1..23: note = source = /note="Description of Artificial Sequence: Synthetic oligonucleotide"
  source 1..23: mol_type = other RNA
atgtagaaaggcatgaagcagtt

SEQ ID NO: 3055 - DNA, 21 bp, synthetic construct
  modified_base 21: mod_base = OTHER; note = Inverted abasic nucleotide
  misc_feature 1..21: note = source = /note="Description of Artificial Sequence: Synthetic oligonucleotide"
  misc_feature 1..21: note = source = /note="Description of Combined DNA/RNA Molecule: Synthetic oligonucleotide"
  source 1..21: mol_type = other DNA
ctgcttcatgcctttctacan

SEQ ID NO: 3056 - RNA, 23 nt, synthetic construct
  misc_feature 1..23: note = source = /note="Description of Artificial Sequence: Synthetic oligonucleotide"
  source 1..23: mol_type = other RNA
atgtagaaaggcatgaagcagtt

SEQ ID NO: 3057 - RNA, 21 nt, synthetic construct
  misc_feature 1..21: note = source = /note="Description of Artificial Sequence: Synthetic oligonucleotide"
  source 1..21: mol_type = other RNA
tgcttcatgcctttctacaga

SEQ ID NO: 3058 - RNA, 23 nt, synthetic construct
  misc_feature 1..23: note = source = /note="Description of Artificial Sequence: Synthetic oligonucleotide"
  source 1..23: mol_type = other RNA
tctgtagaaaggcatgaagcatt

SEQ ID NO: 3059 - DNA, 21 bp, synthetic construct
  misc_feature 1..21: note = source = /note="Description of Artificial Sequence: Synthetic oligonucleotide"
  misc_feature 1..21: note = source = /note="Description of Combined DNA/RNA Molecule: Synthetic oligonucleotide"
  source 1..21: mol_type = other DNA
tgcttcatgcctttctacaga

SEQ ID NO: 3060 - RNA, 23 nt, synthetic construct
  misc_feature 1..23: note = source = /note="Description of Artificial Sequence: Synthetic oligonucleotide"
  source 1..23: mol_type = other RNA
tctgtagaaaggcatgaagcatt

SEQ ID NO: 3061 - RNA, 21 nt, synthetic construct
  modified_base 21: mod_base = OTHER; note = Inverted abasic nucleotide
  misc_feature 1..21: note = source = /note="Description of Artificial Sequence: Synthetic oligonucleotide"
  source 1..21: mol_type = other RNA
tcatgcctttctacagtggcn

SEQ ID NO: 3062 - RNA, 23 nt, synthetic construct
  modified_base 6: mod_base = OTHER; note = Abasic nucleotide
  misc_feature 1..23: note = source = /note="Description of Artificial Sequence: Synthetic oligonucleotide"
  source 1..23: mol_type = other RNA
agccantgtagaaaggcatgatt

SEQ ID NO: 3063 - RNA, 21 nt, synthetic construct
  modified_base 21: mod_base = OTHER; note = Inverted abasic nucleotide
  misc_feature 1..21: note = source = /note="Description of Artificial Sequence: Synthetic oligonucleotide"
  source 1..21: mol_type = other RNA
ctgcttcatgcctttctacan

SEQ ID NO: 3064 - RNA, 23 nt, synthetic construct
  modified_base 6: mod_base = OTHER; note = Abasic nucleotide
  misc_feature 1..23: note = source = /note="Description of Artificial Sequence: Synthetic oligonucleotide"
  source 1..23: mol_type = other RNA
atgtanaaaggcatgaagcagtt

SEQ ID NO: 3065 - RNA, 21 nt, synthetic construct
  modified_base 21: mod_base = OTHER; note = Inverted abasic nucleotide
  misc_feature 1..21: note = source = /note="Description of Artificial Sequence: Synthetic oligonucleotide"
  source 1..21: mol_type = other RNA
tcatgcctttctacagtggcn

SEQ ID NO: 3066 - RNA, 23 nt, synthetic construct
  modified_base 6: mod_base = OTHER; note = Abasic nucleotide
  misc_feature 1..23: note = source = /note="Description of Artificial Sequence: Synthetic oligonucleotide"
  source 1..23: mol_type = other RNA
agccantgtagaaaggcatgatt

SEQ ID NO: 3067 - RNA, 21 nt, synthetic construct
  modified_base 21: mod_base = OTHER; note = Inverted abasic nucleotide
  misc_feature 1..21: note = source = /note="Description of Artificial Sequence: Synthetic oligonucleotide"
  source 1..21: mol_type = other RNA
ctgcttcatgcctttctacan

SEQ ID NO: 3068 - RNA, 23 nt, synthetic construct
  modified_base 3: mod_base = OTHER; note = Inosine
  misc_feature 1..23: note = source = /note="Description of Artificial Sequence: Synthetic oligonucleotide"
  source 1..23: mol_type = other RNA
atntagaaaggcatgaagcagtt

SEQ ID NO: 3069 - RNA, 21 nt, synthetic construct
  modified_base 21: mod_base = OTHER; note = Inverted abasic nucleotide
  misc_feature 1..21: note = source = /note="Description of Artificial Sequence: Synthetic oligonucleotide"
  source 1..21: mol_type = other RNA
ctgcttcatgcctttctagan

SEQ ID NO: 3070 - RNA, 23 nt, synthetic construct
  misc_feature 1..23: note = source = /note="Description of Artificial Sequence: Synthetic oligonucleotide"
  source 1..23: mol_type = other RNA
atctagaaaggcatgaagcagtt

SEQ ID NO: 3071 - RNA, 21 nt, synthetic construct
  modified_base 21: mod_base = OTHER; note = Inverted abasic nucleotide
  misc_feature 1..21: note = source = /note="Description of Artificial Sequence: Synthetic oligonucleotide"
  source 1..21: mol_type = other RNA
ctgcttcatgccttactacan

SEQ ID NO: 3072 - RNA, 23 nt, synthetic construct
  misc_feature 1..23: note = source = /note="Description of Artificial Sequence: Synthetic oligonucleotide"
  source 1..23: mol_type = other RNA
atgtagtaaggcatgaagcagtt

SEQ ID NO: 3073 - RNA, 21 nt, synthetic construct
  modified_base 21: mod_base = OTHER; note = Inverted abasic nucleotide
  misc_feature 1..21: note = source = /note="Description of Artificial Sequence: Synthetic oligonucleotide"
  source 1..21: mol_type = other RNA
tgcttcatgcctttctacagn

SEQ ID NO: 3074 - RNA, 23 nt, synthetic construct
  modified_base 4: mod_base = OTHER; note = Inosine
  misc_feature 1..23: note = source = /note="Description of Artificial Sequence: Synthetic oligonucleotide"
  source 1..23: mol_type = other RNA
actntagaaaggcatgaagcatt

SEQ ID NO: 3075 - RNA, 21 nt, synthetic construct
  modified_base 21: mod_base = OTHER; note = Inverted abasic nucleotide
  misc_feature 1..21: note = source = /note="Description of Artificial Sequence: Synthetic oligonucleotide"
  source 1..21: mol_type = other RNA
tgcttcatgcctttctacagn

SEQ ID NO: 3076 - RNA, 23 nt, synthetic construct
  modified_base 8: mod_base = OTHER; note = Inosine
  misc_feature 1..23: note = source = /note="Description of Artificial Sequence: Synthetic oligonucleotide"
  source 1..23: mol_type = other RNA
actgtagnaaggcatgaagcatt

SEQ ID NO: 3077 - RNA, 21 nt, synthetic construct
  modified_base 21: mod_base = OTHER; note = Inverted abasic nucleotide
  misc_feature 1..21: note = source = /note="Description of Artificial Sequence: Synthetic oligonucleotide"
  source 1..21: mol_type = other RNA
tgcttcatgccttcctacagn

SEQ ID NO: 3078 - RNA, 23 nt, synthetic construct
  modified_base 8: mod_base = OTHER; note = Inosine
  misc_feature 1..23: note = source = /note="Description of Artificial Sequence: Synthetic oligonucleotide"
  source 1..23: mol_type = other RNA
actgtagnaaggcatgaagcatt

SEQ ID NO: 3079 - RNA, 21 nt, synthetic construct
  modified_base 21: mod_base = OTHER; note = Inverted abasic nucleotide
  misc_feature 1..21: note = source = /note="Description of Artificial Sequence: Synthetic oligonucleotide"
  source 1..21: mol_type = other RNA
ctgcttcatgcctttctatan

SEQ ID NO: 3080 - RNA, 23 nt, synthetic construct
  misc_feature 1..23: note = source = /note="Description of Artificial Sequence: Synthetic oligonucleotide"
  source 1..23: mol_type = other RNA
atatagaaaggcatgaagcagtt

SEQ ID NO: 3081 - RNA, 21 nt, synthetic construct
  modified_base 21: mod_base = OTHER; note = Inverted abasic nucleotide
  misc_feature 1..21: note = source = /note="Description of Artificial Sequence: Synthetic oligonucleotide"
  source 1..21: mol_type = other RNA
ctgcttcatgcctttttacan

SEQ ID NO: 3082 - RNA, 23 nt, synthetic construct
  misc_feature 1..23: note = source = /note="Description of Artificial Sequence: Synthetic oligonucleotide"
  source 1..23: mol_type = other RNA
atgtaaaaaggcatgaagcagtt

SEQ ID NO: 3083 - RNA, 21 nt, synthetic construct
  modified_base 21: mod_base = OTHER; note = Inverted abasic nucleotide
  misc_feature 1..21: note = source = /note="Description of Artificial Sequence: Synthetic oligonucleotide"
  source 1..21: mol_type = other RNA
ctgcttcatgcctttctacan

SEQ ID NO: 3084 - RNA, 23 nt, synthetic construct
  misc_feature 1..23: note = source = /note="Description of Artificial Sequence: Synthetic oligonucleotide"
  source 1..23: mol_type = other RNA
atgtagaaaggcatgaagcagtt

SEQ ID NO: 3085 - RNA, 21 nt, synthetic construct
  modified_base 21: mod_base = OTHER; note = Inverted abasic nucleotide
  misc_feature 1..21: note = source = /note="Description of Artificial Sequence: Synthetic oligonucleotide"
  source 1..21: mol_type = other RNA
ctgcttcatgcctttctacan

SEQ ID NO: 3086 - RNA, 23 nt, synthetic construct
  misc_feature 1..23: note = source = /note="Description of Artificial Sequence: Synthetic oligonucleotide"
  source 1..23: mol_type = other RNA
atgtagaaaggcatgaagcagtt

SEQ ID NO: 3087 - DNA, 21 bp, synthetic construct
  modified_base 21: mod_base = OTHER; note = Inverted abasic nucleotide
  misc_feature 1..21: note = source = /note="Description of Artificial Sequence: Synthetic oligonucleotide"
  misc_feature 1..21: note = source = /note="Description of Combined DNA/RNA Molecule: Synthetic oligonucleotide"
  source 1..21: mol_type = other DNA
ctgcttcatgcctttctacan

SEQ ID NO: 3088 - RNA, 23 nt, synthetic construct
  misc_feature 1..23: note = source = /note="Description of Artificial Sequence: Synthetic oligonucleotide"
  source 1..23: mol_type = other RNA
atgtagaaaggcatgaagcagtt

SEQ ID NO: 3089 - DNA, 21 bp, synthetic construct
  modified_base 21: mod_base = OTHER; note = Inverted abasic nucleotide
  misc_feature 1..21: note = source = /note="Description of Artificial Sequence: Synthetic oligonucleotide"
  misc_feature 1..21: note = source = /note="Description of Combined DNA/RNA Molecule: Synthetic oligonucleotide"
  source 1..21: mol_type = other DNA
ctgcttcatgcctttctacan

SEQ ID NO: 3090 - RNA, 23 nt, synthetic construct
  modified_base 8: mod_base = OTHER; note = Abasic nucleotide
  misc_feature 1..23: note = source = /note="Description of Artificial Sequence: Synthetic oligonucleotide"
  source 1..23: mol_type = other RNA
atgtaganaggcatgaagcagtt

SEQ ID NO: 3091 - RNA, 21 nt, synthetic construct
  modified_base 21: mod_base = OTHER; note = Inverted abasic nucleotide
  misc_feature 1..21: note = source = /note="Description of Artificial Sequence: Synthetic oligonucleotide"
  source 1..21: mol_type = other RNA
ctgcttcatgcctttctacan

SEQ ID NO: 3092 - RNA, 23 nt, synthetic construct
  modified_base 2: mod_base = OTHER; note = Abasic nucleotide
  misc_feature 1..23: note = source = /note="Description of Artificial Sequence: Synthetic oligonucleotide"
  source 1..23: mol_type = other RNA
angtagaaaggcatgaagcagtt

SEQ ID NO: 3093 - RNA, 21 nt, synthetic construct
  modified_base 21: mod_base = OTHER; note = Inverted abasic nucleotide
  misc_feature 1..21: note = source = /note="Description of Artificial Sequence: Synthetic oligonucleotide"
  source 1..21: mol_type = other RNA
ctgcttcatgcctttctacan

SEQ ID NO: 3094 - RNA, 23 nt, synthetic construct
  misc_feature 1..23: note = source = /note="Description of Artificial Sequence: Synthetic oligonucleotide"
  source 1..23: mol_type = other RNA
atgtagaaaggcatgaagcagtt

SEQ ID NO: 3095 - RNA, 21 nt, synthetic construct
  misc_feature 1..21: note = source = /note="Description of Artificial Sequence: Synthetic oligonucleotide"
  source 1..21: mol_type = other RNA
tgcttcatgcctttctacaga

SEQ ID NO: 3096 - RNA, 23 nt, synthetic construct
  modified_base 7: mod_base = OTHER; note = Abasic nucleotide
  misc_feature 1..23: note = source = /note="Description of Artificial Sequence: Synthetic oligonucleotide"
  source 1..23: mol_type = other RNA
tctgtanaaaggcatgaagcatt

SEQ ID NO: 3097 - RNA, 21 nt, synthetic construct
  modified_base 21: mod_base = OTHER; note = Inverted abasic nucleotide
  misc_feature 1..21: note = source = /note="Description of Artificial Sequence: Synthetic oligonucleotide"
  source 1..21: mol_type = other RNA
ctgcttcatgcctttctacan

SEQ ID NO: 3098 - RNA, 23 nt, synthetic construct
  modified_base 7: mod_base = OTHER; note = Inosine
  misc_feature 1..23: note = source = /note="Description of Artificial Sequence: Synthetic oligonucleotide"
  source 1..23: mol_type = other RNA
atgtagnaaggcatgaagcagtt

SEQ ID NO: 3099 - RNA, 21 nt, synthetic construct
  modified_base 21: mod_base = OTHER; note = Inverted abasic nucleotide
  misc_feature 1..21: note = source = /note="Description of Artificial Sequence: Synthetic oligonucleotide"
  source 1..21: mol_type = other RNA
ctgcttcatgcctttctacan

SEQ ID NO: 3100 - RNA, 23 nt, synthetic construct
  misc_feature 1..23: note = source = /note="Description of Artificial Sequence: Synthetic oligonucleotide"
  source 1..23: mol_type = other RNA
atgtagaaaggcatgaagcagtt

SEQ ID NO: 3101 - DNA, 21 bp, synthetic construct
  modified_base 21: mod_base = OTHER; note = Inverted abasic nucleotide
  misc_feature 1..21: note = source = /note="Description of Artificial Sequence: Synthetic oligonucleotide"
  misc_feature 1..21: note = source = /note="Description of Combined DNA/RNA Molecule: Synthetic oligonucleotide"
  source 1..21: mol_type = other DNA
ctgcttcatgcctttctacan

SEQ ID NO: 3102 - RNA, 23 nt, synthetic construct
  misc_feature 1..23: note = source = /note="Description of Artificial Sequence: Synthetic oligonucleotide"
  source 1..23: mol_type = other RNA
atgtagaaaggcatgaagcagtt

SEQ ID NO: 3103 - RNA, 21 nt, synthetic construct
  modified_base 21: mod_base = OTHER; note = Inverted abasic nucleotide
  misc_feature 1..21: note = source = /note="Description of Artificial Sequence: Synthetic oligonucleotide"
  source 1..21: mol_type = other RNA
ctgcttcatgcctttctacan

SEQ ID NO: 3104 - RNA, 23 nt, synthetic construct
  misc_feature 1..23: note = source = /note="Description of Artificial Sequence: Synthetic oligonucleotide"
  source 1..23: mol_type = other RNA
atgtagaaaggcatgaagcagtt

SEQ ID NO: 3105 - RNA, 21 nt, synthetic construct
  modified_base 21: mod_base = OTHER; note = Inverted abasic nucleotide
  misc_feature 1..21: note = source = /note="Description of Artificial Sequence: Synthetic oligonucleotide"
  source 1..21: mol_type = other RNA
ctgcttcatgcctttctacan

SEQ ID NO: 3106 - RNA, 23 nt, synthetic construct
  misc_feature 1..23: note = source = /note="Description of Artificial Sequence: Synthetic oligonucleotide"
  source 1..23: mol_type = other RNA
atgtagaaaggcatgaagcagtt

SEQ ID NO: 3107 - RNA, 21 nt, synthetic construct
  modified_base 21: mod_base = OTHER; note = Inverted abasic nucleotide
  misc_feature 1..21: note = source = /note="Description of Artificial Sequence: Synthetic oligonucleotide"
  source 1..21: mol_type = other RNA
ctgcttcatgcctttctacan

SEQ ID NO: 3108 - RNA, 23 nt, synthetic construct
  misc_feature 1..23: note = source = /note="Description of Artificial Sequence: Synthetic oligonucleotide"
  source 1..23: mol_type = other RNA
atgtagaaaggcatgaagcagtt

SEQ ID NO: 3109 - RNA, 21 nt, synthetic construct
  modified_base 21: mod_base = OTHER; note = Inverted abasic nucleotide
  misc_feature 1..21: note = source = /note="Description of Artificial Sequence: Synthetic oligonucleotide"
  source 1..21: mol_type = other RNA
ctgcttcatgcctttctacan

SEQ ID NO: 3110 - RNA, 23 nt, synthetic construct
  misc_feature 1..23: note = source = /note="Description of Artificial Sequence: Synthetic oligonucleotide"
  source 1..23: mol_type = other RNA
atgtagaaaggcatgaagcagtt

SEQ ID NO: 3111 - RNA, 21 nt, synthetic construct
  modified_base 21: mod_base = OTHER; note = Inverted abasic nucleotide
  misc_feature 1..21: note = source = /note="Description of Artificial Sequence: Synthetic oligonucleotide"
  source 1..21: mol_type = other RNA
ctgcttcatgcctttctacan

SEQ ID NO: 3112 - RNA, 23 nt, synthetic construct
  misc_feature 1..23: note = source = /note="Description of Artificial Sequence: Synthetic oligonucleotide"
  source 1..23: mol_type = other RNA
atgtagaaaggcatgaagcagtt

SEQ ID NO: 3113 - RNA, 21 nt, synthetic construct
  modified_base 21: mod_base = OTHER; note = Inverted abasic nucleotide
  misc_feature 1..21: note = source = /note="Description of Artificial Sequence: Synthetic oligonucleotide"
  source 1..21: mol_type = other RNA
ctgcttcatgcctttctacan

SEQ ID NO: 3114 - RNA, 23 nt, synthetic construct
  misc_feature 1..23: note = source = /note="Description of Artificial Sequence: Synthetic oligonucleotide"
  source 1..23: mol_type = other RNA
atgtagaaaggcatgaagcagtt

SEQ ID NO: 3115 - DNA, 21 bp, synthetic construct
  modified_base 21: mod_base = OTHER; note = Inverted abasic nucleotide
  misc_feature 1..21: note = source = /note="Description of Artificial Sequence: Synthetic oligonucleotide"
  misc_feature 1..21: note = source = /note="Description of Combined DNA/RNA Molecule: Synthetic oligonucleotide"
  source 1..21: mol_type = other DNA
ctgcttcatgcctttctacan

SEQ ID NO: 3116 - RNA, 23 nt, synthetic construct
  misc_feature 1..23: note = source = /note="Description of Artificial Sequence: Synthetic oligonucleotide"
  source 1..23: mol_type = other RNA
atgtagaaaggcatgaagcagtt

SEQ ID NO: 3117 - RNA, 21 nt, synthetic construct
  modified_base 21: mod_base = OTHER; note = Inverted abasic nucleotide
  misc_feature 1..21: note = source = /note="Description of Artificial Sequence: Synthetic oligonucleotide"
  source 1..21: mol_type = other RNA
ctgcttcatgcctttctacan

SEQ ID NO: 3118 - RNA, 23 nt, synthetic construct
  misc_feature 1..23: note = source = /note="Description of Artificial Sequence: Synthetic oligonucleotide"
  source 1..23: mol_type = other RNA
atgtagaaaggcatgaagcagtt

SEQ ID NO: 3119 - RNA, 21 nt, synthetic construct
  modified_base 21: mod_base = OTHER; note = Inverted abasic nucleotide
  misc_feature 1..21: note = source = /note="Description of Artificial Sequence: Synthetic oligonucleotide"
  source 1..21: mol_type = other RNA
tcatgcctttctacagtggcn

SEQ ID NO: 3120 - RNA, 23 nt, synthetic construct
  modified_base 6: mod_base = OTHER; note = Abasic nucleotide
  misc_feature 1..23: note = source = /note="Description of Artificial Sequence: Synthetic oligonucleotide"
  source 1..23: mol_type = other RNA
agccantgtagaaaggcatgatt

SEQ ID NO: 3121 - RNA, 21 nt, synthetic construct
  modified_base 21: mod_base = OTHER; note = Inverted abasic nucleotide
  misc_feature 1..21: note = source = /note="Description of Artificial Sequence: Synthetic oligonucleotide"
  source 1..21: mol_type = other RNA
ctgcttcatgggattctacan

SEQ ID NO: 3122 - RNA, 23 nt, synthetic construct
  misc_feature 1..23: note = source = /note="Description of Artificial Sequence: Synthetic oligonucleotide"
  source 1..23: mol_type = other RNA
atgtagaatcccatgaagcagtt

SEQ ID NO: 3123 - RNA, 21 nt, synthetic construct
  modified_base 21: mod_base = OTHER; note = Inverted abasic nucleotide
  misc_feature 1..21: note = source = /note="Description of Artificial Sequence: Synthetic oligonucleotide"
  source 1..21: mol_type = other RNA
ctgcttcatgcctttctacan

SEQ ID NO: 3124 - RNA, 23 nt, synthetic construct
  misc_feature 1..23: note = source = /note="Description of Artificial Sequence: Synthetic oligonucleotide"
  source 1..23: mol_type = other RNA
atgtagaaaggcatgaagcagtt

SEQ ID NO: 3125 - RNA, 21 nt, synthetic construct
  modified_base 21: mod_base = OTHER; note = Inverted abasic nucleotide
  misc_feature 1..21: note = source = /note="Description of Artificial Sequence: Synthetic oligonucleotide"
  source 1..21: mol_type = other RNA
gtatgttcctgcttcatgccn

SEQ ID NO: 3126 - RNA, 23 nt, synthetic construct
  misc_feature 1..23: note = source = /note="Description of Artificial Sequence: Synthetic oligonucleotide"
  source 1..23: mol_type = other RNA
aggcatgaagcaggaacatactt

SEQ ID NO: 3127 - RNA, 21 nt, synthetic construct
  modified_base 21: mod_base = OTHER; note = Inverted abasic nucleotide
  misc_feature 1..21: note = source = /note="Description of Artificial Sequence: Synthetic oligonucleotide"
  source 1..21: mol_type = other RNA
tgtcctgcttcatgcctttcn

SEQ ID NO: 3128 - RNA, 23 nt, synthetic construct
  misc_feature 1..23: note = source = /note="Description of Artificial Sequence: Synthetic oligonucleotide"
  source 1..23: mol_type = other RNA
agaaaggcatgaagcaggacatt

SEQ ID NO: 3129 - RNA, 21 nt, synthetic construct
  modified_base 21: mod_base = OTHER; note = Inverted abasic nucleotide
  misc_feature 1..21: note = source = /note="Description of Artificial Sequence: Synthetic oligonucleotide"
  source 1..21: mol_type = other RNA
gcttcatgcctttctacagtn

SEQ ID NO: 3130 - RNA, 23 nt, synthetic construct
  misc_feature 1..23: note = source = /note="Description of Artificial Sequence: Synthetic oligonucleotide"
  source 1..23: mol_type = other RNA
aactgtagaaaggcatgaagctt

SEQ ID NO: 3131 - RNA, 21 nt, synthetic construct
  modified_base 21: mod_base = OTHER; note = Inverted abasic nucleotide
  misc_feature 1..21: note = source = /note="Description of Artificial Sequence: Synthetic oligonucleotide"
  source 1..21: mol_type = other RNA
cttcatgcctttctacagtgn

SEQ ID NO: 3132 - RNA, 23 nt, synthetic construct
  misc_feature 1..23: note = source = /note="Description of Artificial Sequence: Synthetic oligonucleotide"
  source 1..23: mol_type = other RNA
acactgtagaaaggcatgaagtt

SEQ ID NO: 3133 - RNA, 21 nt, synthetic construct
  modified_base 21: mod_base = OTHER; note = Inverted abasic nucleotide
  misc_feature 1..21: note = source = /note="Description of Artificial Sequence: Synthetic oligonucleotide"
  source 1..21: mol_type = other RNA
ttcatgcctttctacagtggn

SEQ ID NO: 3134 - RNA, 23 nt, synthetic construct
  misc_feature 1..23: note = source = /note="Description of Artificial Sequence: Synthetic oligonucleotide"
  source 1..23: mol_type = other RNA
accactgtagaaaggcatgaatt

SEQ ID NO: 3135 - RNA, 21 nt, synthetic construct
  modified_base 21: mod_base = OTHER; note = Inverted abasic nucleotide
  misc_feature 1..21: note = source = /note="Description of Artificial Sequence: Synthetic oligonucleotide"
  source 1..21: mol_type = other RNA
ctgcttcatgcctttcaacan

SEQ ID NO: 3136 - RNA, 23 nt, synthetic construct
  misc_feature 1..23: note = source = /note="Description of Artificial Sequence: Synthetic oligonucleotide"
  source 1..23: mol_type = other RNA
atgttgaaaggcatgaagcagtt

SEQ ID NO: 3137 - RNA, 21 nt, synthetic construct
  modified_base 21: mod_base = OTHER; note = Inverted abasic nucleotide
  misc_feature 1..21: note = source = /note="Description of Artificial Sequence: Synthetic oligonucleotide"
  source 1..21: mol_type = other RNA
ctgcttcatgcctttctccan

SEQ ID NO: 3138 - RNA, 23 nt, synthetic construct
  modified_base 4: mod_base = OTHER; note = Inosine
  misc_feature 1..23: note = source = /note="Description of Artificial Sequence: Synthetic oligonucleotide"
  source 1..23: mol_type = other RNA
atgnagaaaggcatgaagcagtt

SEQ ID NO: 3139 - RNA, 21 nt, synthetic construct
  modified_base 21: mod_base = OTHER; note = Inverted abasic nucleotide
  misc_feature 1..21: note = source = /note="Description of Artificial Sequence: Synthetic oligonucleotide"
  source 1..21: mol_type = other RNA
tgcttcatgcctttctccagn

SEQ ID NO: 3140 - RNA, 23 nt, synthetic construct
  modified_base 5: mod_base = OTHER; note = Inosine
  misc_feature 1..23: note = source = /note="Description of Artificial Sequence: Synthetic oligonucleotide"
  source 1..23: mol_type = other RNA
actgnagaaaggcatgaagcatt

SEQ ID NO: 3141 - RNA, 21 nt, synthetic construct
  modified_base 21: mod_base = OTHER; note = Inverted abasic nucleotide
  misc_feature 1..21: note = source = /note="Description of Artificial Sequence: Synthetic oligonucleotide"
  source 1..21: mol_type = other RNA
ctgcttcatgcctttctacan

SEQ ID NO: 3142 - RNA, 23 nt, synthetic construct
  modified_base 5: mod_base = OTHER; note = Inosine
  misc_feature 1..23: note = source = /note="Description of Artificial Sequence: Synthetic oligonucleotide"
  source 1..23: mol_type = other RNA
atgtngaaaggcatgaagcagtt

SEQ ID NO: 3143 - RNA, 21 nt, synthetic construct
  modified_base 21: mod_base = OTHER; note = Inverted abasic nucleotide
  misc_feature 1..21: note = source = /note="Description of Artificial Sequence: Synthetic oligonucleotide"
  source 1..21: mol_type = other RNA
tgcttcatgcctttctacagn

SEQ ID NO: 3144 - RNA, 23 nt, synthetic construct
  modified_base 6: mod_base = OTHER; note = Inosine
  misc_feature 1..23: note = source = /note="Description of Artificial Sequence: Synthetic oligonucleotide"
  source 1..23: mol_type = other RNA
actgtngaaaggcatgaagcatt

SEQ ID NO: 3145 - RNA, 21 nt, synthetic construct
  modified_base 21: mod_base = OTHER; note = Inverted abasic nucleotide
  misc_feature 1..21: note = source = /note="Description of Artificial Sequence: Synthetic oligonucleotide"
  source 1..21: mol_type = other RNA
ctgcttcatgcctttctacan

SEQ ID NO: 3146 - RNA, 23 nt, synthetic construct
  modified_base 6: mod_base = OTHER; note = Inosine
  misc_feature 1..23: note = source = /note="Description of Artificial Sequence: Synthetic oligonucleotide"
  source 1..23: mol_type = other RNA
atgtanaaaggcatgaagcagtt

SEQ ID NO: 3147 - RNA, 21 nt, synthetic construct
  modified_base 21: mod_base = OTHER; note = Inverted abasic nucleotide
  misc_feature 1..21: note = source = /note="Description of Artificial Sequence: Synthetic oligonucleotide"
  source 1..21: mol_type = other RNA
tgcttcatgcctttctacagn

SEQ ID NO: 3148 - RNA, 23 nt, synthetic construct
  modified_base 7: mod_base = OTHER; note = Inosine
  misc_feature 1..23: note = source = /note="Description of Artificial Sequence: Synthetic oligonucleotide"
  source 1..23: mol_type = other RNA
actgtanaaaggcatgaagcatt

SEQ ID NO: 3149 - RNA, 21 nt, synthetic construct
  modified_base 21: mod_base = OTHER; note = Inverted abasic nucleotide
  misc_feature 1..21: note = source = /note="Description of Artificial Sequence: Synthetic oligonucleotide"
  source 1..21: mol_type = other RNA
ctgcttcatgccttcctacan

SEQ ID NO: 3150 - RNA, 23 nt, synthetic construct
  modified_base 7: mod_base = OTHER; note = Inosine
  misc_feature 1..23: note = source = /note="Description of Artificial Sequence: Synthetic oligonucleotide"
  source 1..23: mol_type = other RNA
atgtagnaaggcatgaagcagtt

SEQ ID NO: 3151 - RNA, 21 nt, synthetic construct
  modified_base 21: mod_base = OTHER; note = Inverted abasic nucleotide
  misc_feature 1..21: note = source = /note="Description of Artificial Sequence: Synthetic oligonucleotide"
  source 1..21: mol_type = other RNA
ctgcttcatgcctctctacan

SEQ ID NO: 3152 - RNA, 23 nt, synthetic construct
  modified_base 8: mod_base = OTHER; note = Inosine
  misc_feature 1..23: note = source = /note="Description of Artificial Sequence: Synthetic oligonucleotide"
  source 1..23: mol_type = other RNA
atgtaganaggcatgaagcagtt

SEQ ID NO: 3153 - RNA, 21 nt, synthetic construct
  misc_feature 1..21: note = source = /note="Description of Artificial Sequence: Synthetic oligonucleotide"
  source 1..21: mol_type = other RNA
tgcttcatgcctttctacaga

SEQ ID NO: 3154 - RNA, 23 nt, synthetic construct
  modified_base 5: mod_base = OTHER; note = Abasic nucleotide
  misc_feature 1..23: note = source = /note="Description of Artificial Sequence: Synthetic oligonucleotide"
  source 1..23: mol_type = other RNA
tctgnagaaaggcatgaagcatt

SEQ ID NO: 3155 - RNA, 21 nt, synthetic construct
  misc_feature 1..21: note = source = /note="Description of Artificial Sequence: Synthetic oligonucleotide"
  source 1..21: mol_type = other RNA
tgcttcatgcctttctacaga

SEQ ID NO: 3156 - RNA, 23 nt, synthetic construct
  misc_feature 1..23: note = source = /note="Description of Artificial Sequence: Synthetic oligonucleotide"
  source 1..23: mol_type = other RNA
tctgtagaaaggcatgaagcatt

SEQ ID NO: 3157 - RNA, 21 nt, synthetic construct
  modified_base 21: mod_base = OTHER; note = Inverted abasic nucleotide
  misc_feature 1..21: note = source = /note="Description of Artificial Sequence: Synthetic oligonucleotide"
  source 1..21: mol_type = other RNA
tcatgcctttctacagtggcn

SEQ ID NO: 3158 - RNA, 23 nt, synthetic construct
  modified_base 6: mod_base = OTHER; note = Abasic nucleotide
  misc_feature 1..23: note = source = /note="Description of Artificial Sequence: Synthetic oligonucleotide"
  source 1..23: mol_type = other RNA
agccantgtagaaaggcatgatt

SEQ ID NO: 3159 - DNA, 21 bp, synthetic construct
  modified_base 21: mod_base = OTHER; note = Inverted abasic nucleotide
  misc_feature 1..21: note = source = /note="Description of Artificial Sequence: Synthetic oligonucleotide"
  misc_feature 1..21: note = source = /note="Description of Combined DNA/RNA Molecule: Synthetic oligonucleotide"
  source 1..21: mol_type = other DNA
ctgcttcatgcctttctacan

SEQ ID NO: 3160 - RNA, 23 nt, synthetic construct
  misc_feature 1..23: note = source = /note="Description of Artificial Sequence: Synthetic oligonucleotide"
  source 1..23: mol_type = other RNA
atgtagaaaggcatgaagcagtt

SEQ ID NO: 3161 - DNA, 21 bp, synthetic construct
  modified_base 21: mod_base = OTHER; note = Inverted abasic nucleotide
  misc_feature 1..21: note = source = /note="Description of Artificial Sequence: Synthetic oligonucleotide"
  misc_feature 1..21: note = source = /note="Description of Combined DNA/RNA Molecule: Synthetic oligonucleotide"
  source 1..21: mol_type = other DNA
ctgcttcatgcctttctacan

SEQ ID NO: 3162 - RNA, 23 nt, synthetic construct
  modified_base 5: mod_base = OTHER; note = Abasic nucleotide
  misc_feature 1..23: note = source = /note="Description of Artificial Sequence: Synthetic oligonucleotide"
  source 1..23: mol_type = other RNA
atgtngaaaggcatgaagcagtt

SEQ ID NO: 3163 - DNA, 21 bp, synthetic construct
  misc_feature 1..21: note = source = /note="Description of Artificial Sequence: Synthetic oligonucleotide"
  misc_feature 1..21: note = source = /note="Description of Combined DNA/RNA Molecule: Synthetic oligonucleotide"
  source 1..21: mol_type = other DNA
tgcttcatgcctttctacaga

SEQ ID NO: 3164 - RNA, 23 nt, synthetic construct
  misc_feature 1..23: note = source = /note="Description of Artificial Sequence: Synthetic oligonucleotide"
  source 1..23: mol_type = other RNA
tctgtagaaaggcatgaagcatt

SEQ ID NO: 3165 - RNA, 21 nt, synthetic construct
  misc_feature 1..21: note = source = /note="Description of Artificial Sequence: Synthetic oligonucleotide"
  source 1..21: mol_type = other RNA
tgcttcatgcctttctacaga

SEQ ID NO: 3166 - RNA, 23 nt, synthetic construct
  misc_feature 1..23: note = source = /note="Description of Artificial Sequence: Synthetic oligonucleotide"
  source 1..23: mol_type = other RNA
tctgtagaaaggcatgaagcatt

SEQ ID NO: 3167 - RNA, 21 nt, synthetic construct
  modified_base 21: mod_base = OTHER; note = Inverted abasic nucleotide
  misc_feature 1..21: note = source = /note="Description of Artificial Sequence: Synthetic oligonucleotide"
  source 1..21: mol_type = other RNA
tcatgcctttctacagtggcn

SEQ ID NO: 3168 - RNA, 23 nt, synthetic construct
  modified_base 6: mod_base = OTHER; note = Abasic nucleotide
  misc_feature 1..23: note = source = /note="Description of Artificial Sequence: Synthetic oligonucleotide"
  source 1..23: mol_type = other RNA
agccantgtagaaaggcatgatt

SEQ ID NO: 3169 - RNA, 21 nt, synthetic construct
  modified_base 21: mod_base = OTHER; note = Inverted abasic nucleotide
  misc_feature 1..21: note = source = /note="Description of Artificial Sequence: Synthetic oligonucleotide"
  source 1..21: mol_type = other RNA
ctgcttcatgcctttctacan

SEQ ID NO: 3170 - RNA, 23 nt, synthetic construct
  modified_base 3: mod_base = OTHER; note = Inosine
  misc_feature 1..23: note = source = /note="Description of Artificial Sequence: Synthetic oligonucleotide"
  source 1..23: mol_type = other RNA
atntagaaaggcatgaagcagtt

SEQ ID NO: 3171 - RNA, 21 nt, synthetic construct
  modified_base 21: mod_base = OTHER; note = Inverted abasic nucleotide
  misc_feature 1..21: note = source = /note="Description of Artificial Sequence: Synthetic oligonucleotide"
  source 1..21: mol_type = other RNA
ctgcttcatgcctttctacan

SEQ ID NO: 3172 - RNA, 23 nt, synthetic construct
  modified_base 7: mod_base = OTHER; note = Inosine
  misc_feature 1..23: note = source = /note="Description of Artificial Sequence: Synthetic oligonucleotide"
  source 1..23: mol_type = other RNA
atgtagnaaggcatgaagcagtt

SEQ ID NO: 3173 - RNA, 21 nt, synthetic construct
  modified_base 21: mod_base = OTHER; note = Inverted abasic nucleotide
  misc_feature 1..21: note = source = /note="Description of Artificial Sequence: Synthetic oligonucleotide"
  source 1..21: mol_type = other RNA
ctgcttcatgccttactacan

SEQ ID NO: 3174 - RNA, 23 nt, synthetic construct
  misc_feature 1..23: note = source = /note="Description of Artificial Sequence: Synthetic oligonucleotide"
  source 1..23: mol_type = other RNA
atgtagtaaggcatgaagcagtt

SEQ ID NO: 3175 - RNA, 21 nt, synthetic construct
  modified_base 21: mod_base = OTHER; note = Inverted abasic nucleotide
  misc_feature 1..21: note = source = /note="Description of Artificial Sequence: Synthetic oligonucleotide"
  source 1..21: mol_type = other RNA
tgcttcatgcctttctacagn

SEQ ID NO: 3176 - RNA, 23 nt, synthetic construct
  modified_base 8: mod_base = OTHER; note = Inosine
  misc_feature 1..23: note = source = /note="Description of Artificial Sequence: Synthetic oligonucleotide"
  source 1..23: mol_type = other RNA
actgtagnaaggcatgaagcatt

SEQ ID NO: 3177 - RNA, 21 nt, synthetic construct
  modified_base 21: mod_base = OTHER; note = Inverted abasic nucleotide
  misc_feature 1..21: note = source = /note="Description of Artificial Sequence: Synthetic oligonucleotide"
  source 1..21: mol_type = other RNA
tgcttcatgccttcctacagn

SEQ ID NO: 3178 - RNA, 23 nt, synthetic construct
  modified_base 8: mod_base = OTHER; note = Inosine
  misc_feature 1..23: note = source = /note="Description of Artificial Sequence: Synthetic oligonucleotide"
  source 1..23: mol_type = other RNA
actgtagnaaggcatgaagcatt

SEQ ID NO: 3179 - RNA, 21 nt, synthetic construct
  modified_base 21: mod_base = OTHER; note = Inverted abasic nucleotide
  misc_feature 1..21: note = source = /note="Description of Artificial Sequence: Synthetic oligonucleotide"
  source 1..21: mol_type = other RNA
tgcttcatgcctttctacagn

SEQ ID NO: 3180 - RNA, 23 nt, synthetic construct
  modified_base 4: mod_base = OTHER; note = Inosine
  misc_feature 1..23: note = source = /note="Description of Artificial Sequence: Synthetic oligonucleotide"
  source 1..23: mol_type = other RNA
actntagaaaggcatgaagcatt

SEQ ID NO: 3181 - RNA, 21 nt, synthetic construct
  modified_base 21: mod_base = OTHER; note = Inverted abasic nucleotide
  misc_feature 1..21: note = source = /note="Description of Artificial Sequence: Synthetic oligonucleotide"
  source 1..21: mol_type = other RNA
ctgcttcatgcctttctacan

SEQ ID NO: 3182 - RNA, 23 nt, synthetic construct
  modified_base 5: mod_base = OTHER; note = Inosine
  misc_feature 1..23: note = source = /note="Description of Artificial Sequence: Synthetic oligonucleotide"
  source 1..23: mol_type = other RNA
atgtngaaaggcatgaagcagtt

SEQ ID NO: 3183 - RNA, 21 nt, synthetic construct
  modified_base 21: mod_base = OTHER; note = Inverted abasic nucleotide
  misc_feature 1..21: note = source = /note="Description of Artificial Sequence: Synthetic oligonucleotide"
  source 1..21: mol_type = other RNA
ctgcttcatgcctttctacan

SEQ ID NO: 3184 - RNA, 23 nt, synthetic construct
  modified_base 5: mod_base = OTHER; note = Inosine
  misc_feature 1..23: note = source = /note="Description of Artificial Sequence: Synthetic oligonucleotide"
  source 1..23: mol_type = other RNA
atgtngaaaggcatgaagcagtt

SEQ ID NO: 3185 - RNA, 21 nt, synthetic construct
  modified_base 21: mod_base = OTHER; note = Inverted abasic nucleotide
  misc_feature 1..21: note = source = /note="Description of Artificial Sequence: Synthetic oligonucleotide"
  source 1..21: mol_type = other RNA
ctgcttcatgcctttctacan

SEQ ID NO: 3186 - RNA, 23 nt, synthetic construct
  modified_base 5: mod_base = OTHER; note = Inosine
  misc_feature 1..23: note = source = /note="Description of Artificial Sequence: Synthetic oligonucleotide"
  source 1..23: mol_type = other RNA
atgtngaaaggcatgaagcagtt

SEQ ID NO: 3187 - RNA, 21 nt, synthetic construct
  modified_base 21: mod_base = OTHER; note = Inverted abasic nucleotide
  misc_feature 1..21: note = source = /note="Description of Artificial Sequence: Synthetic oligonucleotide"
  source 1..21: mol_type = other RNA
ctgcttcatgcctttctacan

SEQ ID NO: 3188 - RNA, 23 nt, synthetic construct
  modified_base 7: mod_base = OTHER; note = Inosine
  misc_feature 1..23: note = source = /note="Description of Artificial Sequence: Synthetic oligonucleotide"
  source 1..23: mol_type = other RNA
atgtagnaaggcatgaagcagtt

SEQ ID NO: 3189 - RNA, 21 nt, synthetic construct
  modified_base 21: mod_base = OTHER; note = Inverted abasic nucleotide
  misc_feature 1..21: note = source = /note="Description of Artificial Sequence: Synthetic oligonucleotide"
  source 1..21: mol_type = other RNA
tcatgcctttctacagtggcn

SEQ ID NO: 3190 - RNA, 23 nt, synthetic construct
  modified_base 6: mod_base = OTHER; note = Abasic nucleotide
  misc_feature 1..23: note = source = /note="Description of Artificial Sequence: Synthetic oligonucleotide"
  source 1..23: mol_type = other RNA
agccantgtagaaaggcatgatt

SEQ ID NO: 3191 - RNA, 21 nt, synthetic construct
  modified_base 21: mod_base = OTHER; note = Inverted abasic nucleotide
  misc_feature 1..21: note = source = /note="Description of Artificial Sequence: Synthetic oligonucleotide"
  source 1..21: mol_type = other RNA
tcatgcctttctacagtggcn

SEQ ID NO: 3192 - RNA, 23 nt, synthetic construct
  modified_base 6: mod_base = OTHER; note = Abasic nucleotide
  misc_feature 1..23: note = source = /note="Description of Artificial Sequence: Synthetic oligonucleotide"
  source 1..23: mol_type = other RNA
agccantgtagaaaggcatgatt

SEQ ID NO: 3193 - RNA, 21 nt, synthetic construct
  modified_base 21: mod_base = OTHER; note = Inverted abasic nucleotide
  misc_feature 1..21: note = source = /note="Description of Artificial Sequence: Synthetic oligonucleotide"
  source 1..21: mol_type = other RNA
ctgcttcatgggattgtacan

SEQ ID NO: 3194 - RNA, 23 nt, synthetic construct
  misc_feature 1..23: note = source = /note="Description of Artificial Sequence: Synthetic oligonucleotide"
  source 1..23: mol_type = other RNA
atgtacaatcccatgaagcagtt

SEQ ID NO: 3195 - DNA, 21 bp, synthetic construct
  modified_base 21: mod_base = OTHER; note = Inverted abasic nucleotide
  misc_feature 1..21: note = source = /note="Description of Artificial Sequence: Synthetic oligonucleotide"
  misc_feature 1..21: note = source = /note="Description of Combined DNA/RNA Molecule: Synthetic oligonucleotide"
  source 1..21: mol_type = other DNA
ctgcttcatgcctttctacan

SEQ ID NO: 3196 - RNA, 23 nt, synthetic construct
  modified_base 5: mod_base = OTHER; note = Inosine
  misc_feature 1..23: note = source = /note="Description of Artificial Sequence: Synthetic oligonucleotide"
  source 1..23: mol_type = other RNA
atgtngaaaggcatgaagcagtt

SEQ ID NO: 3197 - RNA, 21 nt, synthetic construct
  modified_base 21: mod_base = OTHER; note = Inverted abasic nucleotide
  misc_feature 1..21: note = source = /note="Description of Artificial Sequence: Synthetic oligonucleotide"
  source 1..21: mol_type = other RNA
tgcttcatgcctttctacagn

SEQ ID NO: 3198 - RNA, 23 nt, synthetic construct
  modified_base 7: mod_base = OTHER; note = Inosine
  misc_feature 1..23: note = source = /note="Description of Artificial Sequence: Synthetic oligonucleotide"
  source 1..23: mol_type = other RNA
actgtanaaaggcatgaagcatt

SEQ ID NO: 3199 - DNA, 21 bp, synthetic construct
  modified_base 21: mod_base = OTHER; note = Inverted abasic nucleotide
  misc_feature 1..21: note = source = /note="Description of Artificial Sequence: Synthetic oligonucleotide"
  misc_feature 1..21: note = source = /note="Description of Combined DNA/RNA Molecule: Synthetic oligonucleotide"
  source 1..21: mol_type = other DNA
ctgcttcatgcctttctacan

SEQ ID NO: 3200 - RNA, 23 nt, synthetic construct
  misc_feature 1..23: note = source = /note="Description of Artificial Sequence: Synthetic oligonucleotide"
  source 1..23: mol_type = other RNA
atgtagaaaggcatgaagcagtt

SEQ ID NO: 3201 - DNA, 21 bp, synthetic construct
  modified_base 21: mod_base = OTHER; note = Inverted abasic nucleotide
  misc_feature 1..21: note = source = /note="Description of Artificial Sequence: Synthetic oligonucleotide"
  misc_feature 1..21: note = source = /note="Description of Combined DNA/RNA Molecule: Synthetic oligonucleotide"
  source 1..21: mol_type = other DNA
ctgcttcatgcctttctacan

SEQ ID NO: 3202 - RNA, 23 nt, synthetic construct
  misc_feature 1..23: note = source = /note="Description of Artificial Sequence: Synthetic oligonucleotide"
  source 1..23: mol_type = other RNA
atgtagaaaggcatgaagcagtt

SEQ ID NO: 3203 - DNA, 21 bp, synthetic construct
  modified_base 21: mod_base = OTHER; note = Inverted abasic nucleotide
  misc_feature 1..21: note = source = /note="Description of Artificial Sequence: Synthetic oligonucleotide"
  misc_feature 1..21: note = source = /note="Description of Combined DNA/RNA Molecule: Synthetic oligonucleotide"
  source 1..21: mol_type = other DNA
ctgcttcatgcctttctacan

SEQ ID NO: 3204 - RNA, 23 nt, synthetic construct
  modified_base 7: mod_base = OTHER; note = Inosine
  misc_feature 1..23: note = source = /note="Description of Artificial Sequence: Synthetic oligonucleotide"
  source 1..23: mol_type = other RNA
atgtagnaaggcatgaagcagtt

SEQ ID NO: 3205 - RNA, 21 nt, synthetic construct
  modified_base 21: mod_base = OTHER; note = Inverted abasic nucleotide
  misc_feature 1..21: note = source = /note="Description of Artificial Sequence: Synthetic oligonucleotide"
  source 1..21: mol_type = other RNA
tcatgcctttctacagtggcn

SEQ ID NO: 3206 - RNA, 23 nt, synthetic construct
  misc_feature 1..23: note = source = /note="Description of Artificial Sequence: Synthetic oligonucleotide"
  source 1..23: mol_type = other RNA
agccactgtagaaaggcatgatt

SEQ ID NO: 3207 - RNA, 21 nt, synthetic construct
  modified_base 21: mod_base = OTHER; note = Inverted abasic nucleotide
  misc_feature 1..21: note = source = /note="Description of Artificial Sequence: Synthetic oligonucleotide"
  source 1..21: mol_type = other RNA
tatgttcctgcttcatgcctn

SEQ ID NO: 3208 - RNA, 23 nt, synthetic construct
  misc_feature 1..23: note = source = /note="Description of Artificial Sequence: Synthetic oligonucleotide"
  source 1..23: mol_type = other RNA
aaggcatgaagcaggaacatatt

SEQ ID NO: 3209 - RNA, 21 nt, synthetic construct
  modified_base 21: mod_base = OTHER; note = Inverted abasic nucleotide
  misc_feature 1..21: note = source = /note="Description of Artificial Sequence: Synthetic oligonucleotide"
  source 1..21: mol_type = other RNA
tgcttcatgcctttctacagn

SEQ ID NO: 3210 - RNA, 23 nt, synthetic construct
  misc_feature 1..23: note = source = /note="Description of Artificial Sequence: Synthetic oligonucleotide"
  source 1..23: mol_type = other RNA
actgtagaaaggcatgaagcatt

SEQ ID NO: 3211 - RNA, 21 nt, synthetic construct
  modified_base 21: mod_base = OTHER; note = Inverted abasic nucleotide
  misc_feature 1..21: note = source = /note="Description of Artificial Sequence: Synthetic oligonucleotide"
  source 1..21: mol_type = other RNA
tgttcctgcttcatgcctttn

SEQ ID NO: 3212 - RNA, 21 nt, synthetic construct
  misc_feature 1..21: note = source = /note="Description of Artificial Sequence: Synthetic oligonucleotide"
  source 1..21: mol_type = other RNA
aaggcatgaagcaggaacatt

SEQ ID NO: 3213 - RNA, 21 nt, synthetic construct
  modified_base 21: mod_base = OTHER; note = Inverted abasic nucleotide
  misc_feature 1..21: note = source = /note="Description of Artificial Sequence: Synthetic oligonucleotide"
  source 1..21: mol_type = other RNA
ctgcttcatgcctttctacan

SEQ ID NO: 3214 - RNA, 23 nt, synthetic construct
  misc_feature 1..23: note = source = /note="Description of Artificial Sequence: Synthetic oligonucleotide"
  source 1..23: mol_type = other RNA
atgtagaaaggcatgaagcagtt

SEQ ID NO: 3215 - RNA, 21 nt, synthetic construct
  modified_base 21: mod_base = OTHER; note = Inverted abasic nucleotide
  misc_feature 1..21: note = source = /note="Description of Artificial Sequence: Synthetic oligonucleotide"
  source 1..21: mol_type = other RNA
tatgttcctgcttcatgcctn

SEQ ID NO: 3216 - RNA, 23 nt, synthetic construct
  misc_feature 1..23: note = source = /note="Description of Artificial Sequence: Synthetic oligonucleotide"
  source 1..23: mol_type = other RNA
aaggcatgaagcaggaacatatt

SEQ ID NO: 3217 - RNA, 19 nt, synthetic construct
  modified_base 19: mod_base = OTHER; note = Inverted abasic nucleotide
  misc_feature 1..19: note = source = /note="Description of Artificial Sequence: Synthetic oligonucleotide"
  source 1..19: mol_type = other RNA
tgttcctgcttcatgcctn

SEQ ID NO: 3218 - RNA, 21 nt, synthetic construct
  misc_feature 1..21: note = source = /note="Description of Artificial Sequence: Synthetic oligonucleotide"
  source 1..21: mol_type = other RNA
aaggcatgaagcaggaacatt

SEQ ID NO: 3219 - RNA, 22 nt, synthetic construct
  modified_base 22: mod_base = OTHER; note = Inverted abasic nucleotide
  misc_feature 1..22: note = source = /note="Description of Artificial Sequence: Synthetic oligonucleotide"
  source 1..22: mol_type = other RNA
tatgttcctgcttcatgccttn

SEQ ID NO: 3220 - RNA, 23 nt, synthetic construct
  misc_feature 1..23: note = source = /note="Description of Artificial Sequence: Synthetic oligonucleotide"
  source 1..23: mol_type = other RNA
aaggcatgaagcaggaacatatt

SEQ ID NO: 3221 - RNA, 21 nt, synthetic construct
  modified_base 21: mod_base = OTHER; note = Inverted abasic nucleotide
  misc_feature 1..21: note = source = /note="Description of Artificial Sequence: Synthetic oligonucleotide"
  source 1..21: mol_type = other RNA
tatgttcctgcttcatgcctn

SEQ ID NO: 3222 - RNA, 23 nt, synthetic construct
  misc_feature 1..23: note = source = /note="Description of Artificial Sequence: Synthetic oligonucleotide"
  source 1..23: mol_type = other RNA
aaggcatgaagcaggaacatacc

SEQ ID NO: 3223 - RNA, 22 nt, synthetic construct
  modified_base 22: mod_base = OTHER; note = Inverted abasic nucleotide
  misc_feature 1..22: note = source = /note="Description of Artificial Sequence: Synthetic oligonucleotide"
  source 1..22: mol_type = other RNA
tatgttcctgcttcatgccttn

SEQ ID NO: 3224 - RNA, 23 nt, synthetic construct
  misc_feature 1..23: note = source = /note="Description of Artificial Sequence: Synthetic oligonucleotide"
  source 1..23: mol_type = other RNA
aaggcatgaagcaggaacatacc

SEQ ID NO: 3225 - RNA, 21 nt, synthetic construct
  modified_base 21: mod_base = OTHER; note = Inverted abasic nucleotide
  misc_feature 1..21: note = source = /note="Description of Artificial Sequence: Synthetic oligonucleotide"
  source 1..21: mol_type = other RNA
tatgttcctgcttcatgcctn

SEQ ID NO: 3226 - RNA, 23 nt, synthetic construct
  misc_feature 1..23: note = source = /note="Description of Artificial Sequence: Synthetic oligonucleotide"
  source 1..23: mol_type = other RNA
aaggcatgaagcaggaacatatt

SEQ ID NO: 3227 - RNA, 21 nt, synthetic construct
  modified_base 21: mod_base = OTHER; note = Inverted abasic nucleotide
  misc_feature 1..21: note = source = /note="Description of Artificial Sequence: Synthetic oligonucleotide"
  source 1..21: mol_type = other RNA
tatgttcctgcttcatgcgtn

SEQ ID NO: 3228 - RNA, 23 nt, synthetic construct
  misc_feature 1..23: note = source = /note="Description of Artificial Sequence: Synthetic oligonucleotide"
  source 1..23: mol_type = other RNA
aacgcatgaagcaggaacatatt

SEQ ID NO: 3229 - RNA, 21 nt, synthetic construct
  modified_base 21: mod_base = OTHER; note = Inverted abasic nucleotide
  misc_feature 1..21: note = source = /note="Description of Artificial Sequence: Synthetic oligonucleotide"
  source 1..21: mol_type = other RNA
tatgttcctgcttcatggctn

SEQ ID NO: 3230 - RNA, 23 nt, synthetic construct
  misc_feature 1..23: note = source = /note="Description of Artificial Sequence: Synthetic oligonucleotide"
  source 1..23: mol_type = other RNA
aagccatgaagcaggaacatatt

SEQ ID NO: 3231 - RNA, 21 nt, synthetic construct
  modified_base 21: mod_base = OTHER; note = Inverted abasic nucleotide
  misc_feature 1..21: note = source = /note="Description of Artificial Sequence: Synthetic oligonucleotide"
  source 1..21: mol_type = other RNA
tatgttcctgcttcaagcctn

SEQ ID NO: 3232 - RNA, 23 nt, synthetic construct
  misc_feature 1..23: note = source = /note="Description of Artificial Sequence: Synthetic oligonucleotide"
  source 1..23: mol_type = other RNA
aaggcttgaagcaggaacatatt

SEQ ID NO: 3233 - RNA, 21 nt, synthetic construct
  modified_base 21: mod_base = OTHER; note = Inverted abasic nucleotide
  misc_feature 1..21: note = source = /note="Description of Artificial Sequence: Synthetic oligonucleotide"
  source 1..21: mol_type = other RNA
tatgttcctgcttcttgcctn

SEQ ID NO: 3234 - RNA, 23 nt, synthetic construct
  misc_feature 1..23: note = source = /note="Description of Artificial Sequence: Synthetic oligonucleotide"
  source 1..23: mol_type = other RNA
aaggcaagaagcaggaacatatt

SEQ ID NO: 3235 - RNA, 21 nt, synthetic construct
  modified_base 21: mod_base = OTHER; note = Inverted abasic nucleotide
  misc_feature 1..21: note = source = /note="Description of Artificial Sequence: Synthetic oligonucleotide"
  source 1..21: mol_type = other RNA
tatgttcctgcttgatgcctn

SEQ ID NO: 3236 - RNA, 23 nt, synthetic construct
  misc_feature 1..23: note = source = /note="Description of Artificial Sequence: Synthetic oligonucleotide"
  source 1..23: mol_type = other RNA
aaggcatcaagcaggaacatatt

SEQ ID NO: 3237 - RNA, 21 nt, synthetic construct
  modified_base 21: mod_base = OTHER; note = Inverted abasic nucleotide
  misc_feature 1..21: note = source = /note="Description of Artificial Sequence: Synthetic oligonucleotide"
  source 1..21: mol_type = other RNA
tatgttcctgctacatgcctn

SEQ ID NO: 3238 - RNA, 23 nt, synthetic construct
  misc_feature 1..23: note = source = /note="Description of Artificial Sequence: Synthetic oligonucleotide"
  source 1..23: mol_type = other RNA
aaggcatgtagcaggaacatatt

SEQ ID NO: 3239 - RNA, 21 nt, synthetic construct
  modified_base 21: mod_base = OTHER; note = Inverted abasic nucleotide
  misc_feature 1..21: note = source = /note="Description of Artificial Sequence: Synthetic oligonucleotide"
  source 1..21: mol_type = other RNA
tatgttcctgcatcatgcctn

SEQ ID NO: 3240 - RNA, 23 nt, synthetic construct
  misc_feature 1..23: note = source = /note="Description of Artificial Sequence: Synthetic oligonucleotide"
  source 1..23: mol_type = other RNA
aaggcatgatgcaggaacatatt

SEQ ID NO: 3241 - RNA, 21 nt, synthetic construct
  modified_base 21: mod_base = OTHER; note = Inverted abasic nucleotide
  misc_feature 1..21: note = source = /note="Description of Artificial Sequence: Synthetic oligonucleotide"
  source 1..21: mol_type = other RNA
tatgttcctggttcatgcctn

SEQ ID NO: 3242 - RNA, 23 nt, synthetic construct
  misc_feature 1..23: note = source = /note="Description of Artificial Sequence: Synthetic oligonucleotide"
  source 1..23: mol_type = other RNA
aaggcatgaaccaggaacatatt

SEQ ID NO: 3243 - RNA, 21 nt, synthetic construct
  modified_base 21: mod_base = OTHER; note = Inverted abasic nucleotide
  misc_feature 1..21: note = source = /note="Description of Artificial Sequence: Synthetic oligonucleotide"
  source 1..21: mol_type = other RNA
tatgttcctccttcatgcctn

SEQ ID NO: 3244 - RNA, 23 nt, synthetic construct
  misc_feature 1..23: note = source = /note="Description of Artificial Sequence: Synthetic oligonucleotide"
  source 1..23: mol_type = other RNA
aaggcatgaaggaggaacatatt

SEQ ID NO: 3245 - RNA, 21 nt, synthetic construct
  modified_base 21: mod_base = OTHER; note = Inverted abasic nucleotide
  misc_feature 1..21: note = source = /note="Description of Artificial Sequence: Synthetic oligonucleotide"
  source 1..21: mol_type = other RNA
tatgttccagcttcatgcctn

SEQ ID NO: 3246 - RNA, 23 nt, synthetic construct
  misc_feature 1..23: note = source = /note="Description of Artificial Sequence: Synthetic oligonucleotide"
  source 1..23: mol_type = other RNA
aaggcatgaagctggaacatatt

SEQ ID NO: 3247 - RNA, 21 nt, synthetic construct
  modified_base 21: mod_base = OTHER; note = Inverted abasic nucleotide
  misc_feature 1..21: note = source = /note="Description of Artificial Sequence: Synthetic oligonucleotide"
  source 1..21: mol_type = other RNA
tatgttcgtgcttcatgcctn

SEQ ID NO: 3248 - RNA, 23 nt, synthetic construct
  misc_feature 1..23: note = source = /note="Description of Artificial Sequence: Synthetic oligonucleotide"
  source 1..23: mol_type = other RNA
aaggcatgaagcacgaacatatt

SEQ ID NO: 3249 - RNA, 21 nt, synthetic construct
  modified_base 21: mod_base = OTHER; note = Inverted abasic nucleotide
  misc_feature 1..21: note = source = /note="Description of Artificial Sequence: Synthetic oligonucleotide"
  source 1..21: mol_type = other RNA
tatgttgctgcttcatgcctn

SEQ ID NO: 3250 - RNA, 23 nt, synthetic construct
  misc_feature 1..23: note = source = /note="Description of Artificial Sequence: Synthetic oligonucleotide"
  source 1..23: mol_type = other RNA
aaggcatgaagcagcaacatatt

SEQ ID NO: 3251 - RNA, 21 nt, synthetic construct
  modified_base 21: mod_base = OTHER; note = Inverted abasic nucleotide
  misc_feature 1..21: note = source = /note="Description of Artificial Sequence: Synthetic oligonucleotide"
  source 1..21: mol_type = other RNA
tatgtacctgcttcatgcctn

SEQ ID NO: 3252 - RNA, 23 nt, synthetic construct
  misc_feature 1..23: note = source = /note="Description of Artificial Sequence: Synthetic oligonucleotide"
  source 1..23: mol_type = other RNA
aaggcatgaagcaggtacatatt

SEQ ID NO: 3253 - RNA, 21 nt, synthetic construct
  modified_base 21: mod_base = OTHER; note = Inverted abasic nucleotide
  misc_feature 1..21: note = source = /note="Description of Artificial Sequence: Synthetic oligonucleotide"
  source 1..21: mol_type = other RNA
tatgatcctgcttcatgcctn

SEQ ID NO: 3254 - RNA, 23 nt, synthetic construct
  misc_feature 1..23: note = source = /note="Description of Artificial Sequence: Synthetic oligonucleotide"
  source 1..23: mol_type = other RNA
aaggcatgaagcaggatcatatt

SEQ ID NO: 3255 - RNA, 21 nt, synthetic construct
  modified_base 21: mod_base = OTHER; note = Inverted abasic nucleotide
  misc_feature 1..21: note = source = /note="Description of Artificial Sequence: Synthetic oligonucleotide"
  source 1..21: mol_type = other RNA
tatcttcctgcttcatgcctn

SEQ ID NO: 3256 - RNA, 23 nt, synthetic construct
  misc_feature 1..23: note = source = /note="Description of Artificial Sequence: Synthetic oligonucleotide"
  source 1..23: mol_type = other RNA
aaggcatgaagcaggaagatatt

SEQ ID NO: 3257 - RNA, 21 nt, synthetic construct
  modified_base 21: mod_base = OTHER; note = Inverted abasic nucleotide
  misc_feature 1..21: note = source = /note="Description of Artificial Sequence: Synthetic oligonucleotide"
  source 1..21: mol_type = other RNA
taagttcctgcttcatgcctn

SEQ ID NO: 3258 - RNA, 23 nt, synthetic construct
  misc_feature 1..23: note = source = /note="Description of Artificial Sequence: Synthetic oligonucleotide"
  source 1..23: mol_type = other RNA
aaggcatgaagcaggaacttatt

SEQ ID NO: 3259 - RNA, 21 nt, synthetic construct
  modified_base 21: mod_base = OTHER; note = Inverted abasic nucleotide
  misc_feature 1..21: note = source = /note="Description of Artificial Sequence: Synthetic oligonucleotide"
  source 1..21: mol_type = other RNA
tttgttcctgcttcatgcctn

SEQ ID NO: 3260 - RNA, 23 nt, synthetic construct
  misc_feature 1..23: note = source = /note="Description of Artificial Sequence: Synthetic oligonucleotide"
  source 1..23: mol_type = other RNA
aaggcatgaagcaggaacaaatt

SEQ ID NO: 3261 - RNA, 21 nt, synthetic construct
  modified_base 21: mod_base = OTHER; note = Inverted abasic nucleotide
  misc_feature 1..21: note = source = /note="Description of Artificial Sequence: Synthetic oligonucleotide"
  source 1..21: mol_type = other RNA
aatgttcctgcttcatgcctn

SEQ ID NO: 3262 - RNA, 23 nt, synthetic construct
  misc_feature 1..23: note = source = /note="Description of Artificial Sequence: Synthetic oligonucleotide"
  source 1..23: mol_type = other RNA
aaggcatgaagcaggaacatttt

SEQ ID NO: 3263 - RNA, 21 nt, synthetic construct
  modified_base 21: mod_base = OTHER; note = Inverted abasic nucleotide
  misc_feature 1..21: note = source = /note="Description of Artificial Sequence: Synthetic oligonucleotide"
  source 1..21: mol_type = other RNA
tcatgcctttctacagtggcn

SEQ ID NO: 3264 - RNA, 23 nt, synthetic construct
  misc_feature 1..23: note = source = /note="Description of Artificial Sequence: Synthetic oligonucleotide"
  source 1..23: mol_type = other RNA
agccactgtagaaaggcatgatt

SEQ ID NO: 3265 - RNA, 21 nt, synthetic construct
  modified_base 21: mod_base = OTHER; note = Inverted abasic nucleotide
  misc_feature 1..21: note = source = /note="Description of Artificial Sequence: Synthetic oligonucleotide"
  source 1..21: mol_type = other RNA
tcatgcctttctacagtgggn

SEQ ID NO: 3266 - RNA, 23 nt, synthetic construct
  misc_feature 1..23: note = source = /note="Description of Artificial Sequence: Synthetic oligonucleotide"
  source 1..23: mol_type = other RNA
acccactgtagaaaggcatgatt

SEQ ID NO: 3267 - RNA, 21 nt, synthetic construct
  modified_base 21: mod_base = OTHER; note = Inverted abasic nucleotide
  misc_feature 1..21: note = source = /note="Description of Artificial Sequence: Synthetic oligonucleotide"
  source 1..21: mol_type = other RNA
tcatgcctttctacagtgccn

SEQ ID NO: 3268 - RNA, 23 nt, synthetic construct
  misc_feature 1..23: note = source = /note="Description of Artificial Sequence: Synthetic oligonucleotide"
  source 1..23: mol_type = other RNA
aggcactgtagaaaggcatgatt

SEQ ID NO: 3269 - RNA, 21 nt, synthetic construct
  modified_base 21: mod_base = OTHER; note = Inverted abasic nucleotide
  misc_feature 1..21: note = source = /note="Description of Artificial Sequence: Synthetic oligonucleotide"
  source 1..21: mol_type = other RNA
tcatgcctttctacagtcgcn

SEQ ID NO: 3270 - RNA, 23 nt, synthetic construct
  misc_feature 1..23: note = source = /note="Description of Artificial Sequence: Synthetic oligonucleotide"
  source 1..23: mol_type = other RNA
agcgactgtagaaaggcatgatt

SEQ ID NO: 3271 - RNA, 21 nt, synthetic construct
  modified_base 21: mod_base = OTHER; note = Inverted abasic nucleotide
  misc_feature 1..21: note = source = /note="Description of Artificial Sequence: Synthetic oligonucleotide"
  source 1..21: mol_type = other RNA
tcatgcctttctacagaggcn

SEQ ID NO: 3272 - RNA, 23 nt, synthetic construct
  misc_feature 1..23: note = source = /note="Description of Artificial Sequence: Synthetic oligonucleotide"
  source 1..23: mol_type = other RNA
agcctctgtagaaaggcatgatt

SEQ ID NO: 3273 - RNA, 21 nt, synthetic construct
  modified_base 21: mod_base = OTHER; note = Inverted abasic nucleotide
  misc_feature 1..21: note = source = /note="Description of Artificial Sequence: Synthetic oligonucleotide"
  source 1..21: mol_type = other RNA
tcatgcctttctacactggcn

SEQ ID NO: 3274 - RNA, 23 nt, synthetic construct
  misc_feature 1..23: note = source = /note="Description of Artificial Sequence: Synthetic oligonucleotide"
  source 1..23: mol_type = other RNA
agccagtgtagaaaggcatgatt

SEQ ID NO: 3275 - RNA, 21 nt, synthetic construct
  modified_base 21: mod_base = OTHER; note = Inverted abasic nucleotide
  misc_feature 1..21: note = source = /note="Description of Artificial Sequence: Synthetic oligonucleotide"
  source 1..21: mol_type = other RNA
tcatgcctttctactgtggcn

SEQ ID NO: 3276 - RNA, 23 nt, synthetic construct
  misc_feature 1..23: note = source = /note="Description of Artificial Sequence: Synthetic oligonucleotide"
  source 1..23: mol_type = other RNA
agccacagtagaaaggcatgatt

SEQ ID NO: 3277 - RNA, 21 nt, synthetic construct
  modified_base 21: mod_base = OTHER; note = Inverted abasic nucleotide
  misc_feature 1..21: note = source = /note="Description of Artificial Sequence: Synthetic oligonucleotide"
  source 1..21: mol_type = other RNA
tcatgcctttctagagtggcn

SEQ ID NO: 3278 - RNA, 23 nt, synthetic construct
  misc_feature 1..23: note = source = /note="Description of Artificial Sequence: Synthetic oligonucleotide"
  source 1..23: mol_type = other RNA
agccactctagaaaggcatgatt

SEQ ID NO: 3279 - RNA, 21 nt, synthetic construct
  modified_base 21: mod_base = OTHER; note = Inverted abasic nucleotide
  misc_feature 1..21: note = source = /note="Description of Artificial Sequence: Synthetic oligonucleotide"
  source 1..21: mol_type = other RNA
tcatgcctttcttcagtggcn

SEQ ID NO: 3280 - RNA, 23 nt, synthetic construct
  misc_feature 1..23: note = source = /note="Description of Artificial Sequence: Synthetic oligonucleotide"
  source 1..23: mol_type = other RNA
agccactgaagaaaggcatgatt

SEQ ID NO: 3281 - RNA, 21 nt, synthetic construct
  modified_base 21: mod_base = OTHER; note = Inverted abasic nucleotide
  misc_feature 1..21: note = source = /note="Description of Artificial Sequence: Synthetic oligonucleotide"
  source 1..21: mol_type = other RNA
tcatgcctttcaacagtggcn

SEQ ID NO: 3282 - RNA, 23 nt, synthetic construct
  misc_feature 1..23: note = source = /note="Description of Artificial Sequence: Synthetic oligonucleotide"
  source 1..23: mol_type = other RNA
agccactgttgaaaggcatgatt

SEQ ID NO: 3283 - RNA, 21 nt, synthetic construct
  modified_base 21: mod_base = OTHER; note = Inverted abasic nucleotide
  misc_feature 1..21: note = source = /note="Description of Artificial Sequence: Synthetic oligonucleotide"
  source 1..21: mol_type = other RNA
tcatgcctttgtacagtggcn

SEQ ID NO: 3284 - RNA, 23 nt, synthetic construct
  misc_feature 1..23: note = source = /note="Description of Artificial Sequence: Synthetic oligonucleotide"
  source 1..23: mol_type = other RNA
agccactgtacaaaggcatgatt

SEQ ID NO: 3285 - RNA, 21 nt, synthetic construct
  modified_base 21: mod_base = OTHER; note = Inverted abasic nucleotide
  misc_feature 1..21: note = source = /note="Description of Artificial Sequence: Synthetic oligonucleotide"
  source 1..21: mol_type = other RNA
tcatgcctatctacagtggcn

SEQ ID NO: 3286 - RNA, 23 nt, synthetic construct
  misc_feature 1..23: note = source = /note="Description of Artificial Sequence: Synthetic oligonucleotide"
  source 1..23: mol_type = other RNA
agccactgtagataggcatgatt

SEQ ID NO: 3287 - RNA, 21 nt, synthetic construct
  modified_base 21: mod_base = OTHER; note = Inverted abasic nucleotide
  misc_feature 1..21: note = source = /note="Description of Artificial Sequence: Synthetic oligonucleotide"
  source 1..21: mol_type = other RNA
tcatgcgtttctacagtggcn

SEQ ID NO: 3288 - RNA, 23 nt, synthetic construct
  misc_feature 1..23: note = source = /note="Description of Artificial Sequence: Synthetic oligonucleotide"
  source 1..23: mol_type = other RNA
agccactgtagaaacgcatgatt

SEQ ID NO: 3289 - RNA, 21 nt, synthetic construct
  modified_base 21: mod_base = OTHER; note = Inverted abasic nucleotide
  misc_feature 1..21: note = source = /note="Description of Artificial Sequence: Synthetic oligonucleotide"
  source 1..21: mol_type = other RNA
tcatggctttctacagtggcn

SEQ ID NO: 3290 - RNA, 23 nt, synthetic construct
  misc_feature 1..23: note = source = /note="Description of Artificial Sequence: Synthetic oligonucleotide"
  source 1..23: mol_type = other RNA
agccactgtagaaagccatgatt

SEQ ID NO: 3291 - RNA, 21 nt, synthetic construct
  modified_base 21: mod_base = OTHER; note = Inverted abasic nucleotide
  misc_feature 1..21: note = source = /note="Description of Artificial Sequence: Synthetic oligonucleotide"
  source 1..21: mol_type = other RNA
tcaagcctttctacagtggcn

SEQ ID NO: 3292 - RNA, 23 nt, synthetic construct
  misc_feature 1..23: note = source = /note="Description of Artificial Sequence: Synthetic oligonucleotide"
  source 1..23: mol_type = other RNA
agccactgtagaaaggcttgatt

SEQ ID NO: 3293 - RNA, 21 nt, synthetic construct
  modified_base 21: mod_base = OTHER; note = Inverted abasic nucleotide
  misc_feature 1..21: note = source = /note="Description of Artificial Sequence: Synthetic oligonucleotide"
  source 1..21: mol_type = other RNA
tcttgcctttctacagtggcn

SEQ ID NO: 3294 - RNA, 23 nt, synthetic construct
  misc_feature 1..23: note = source = /note="Description of Artificial Sequence: Synthetic oligonucleotide"
  source 1..23: mol_type = other RNA
agccactgtagaaaggcaagatt

SEQ ID NO: 3295 - RNA, 21 nt, synthetic construct
  modified_base 21: mod_base = OTHER; note = Inverted abasic nucleotide
  misc_feature 1..21: note = source = /note="Description of Artificial Sequence: Synthetic oligonucleotide"
  source 1..21: mol_type = other RNA
tgatgcctttctacagtggcn

SEQ ID NO: 3296 - RNA, 23 nt, synthetic construct
  misc_feature 1..23: note = source = /note="Description of Artificial Sequence: Synthetic oligonucleotide"
  source 1..23: mol_type = other RNA
agccactgtagaaaggcatcatt

SEQ ID NO: 3297 - RNA, 21 nt, synthetic construct
  modified_base 21: mod_base = OTHER; note = Inverted abasic nucleotide
  misc_feature 1..21: note = source = /note="Description of Artificial Sequence: Synthetic oligonucleotide"
  source 1..21: mol_type = other RNA
acatgcctttctacagtggcn

SEQ ID NO: 3298 - RNA, 23 nt, synthetic construct
  misc_feature 1..23: note = source = /note="Description of Artificial Sequence: Synthetic oligonucleotide"
  source 1..23: mol_type = other RNA
agccactgtagaaaggcatgttt

SEQ ID NO: 3299 - RNA, 21 nt, synthetic construct
  modified_base 21: mod_base = OTHER; note = Inverted abasic nucleotide
  misc_feature 1..21: note = source = /note="Description of Artificial Sequence: Synthetic oligonucleotide"
  source 1..21: mol_type = other RNA
tcatgccttactacagtggcn

SEQ ID NO: 3300 - RNA, 23 nt, synthetic construct
  misc_feature 1..23: note = source = /note="Description of Artificial Sequence: Synthetic oligonucleotide"
  source 1..23: mol_type = other RNA
agccactgtagtaaggcatgatt

SEQ ID NO: 3301 - RNA, 21 nt, synthetic construct
  modified_base 21: mod_base = OTHER; note = Inverted abasic nucleotide
  misc_feature 1..21: note = source = /note="Description of Artificial Sequence: Synthetic oligonucleotide"
  source 1..21: mol_type = other RNA
atgcctttctacagtggcttn

SEQ ID NO: 3302 - RNA, 21 nt, synthetic construct
  misc_feature 1..21: note = source = /note="Description of Artificial Sequence: Synthetic oligonucleotide"
  source 1..21: mol_type = other RNA
agccactgtagaaaggcattt

SEQ ID NO: 3303 - RNA, 19 nt, synthetic construct
  modified_base 19: mod_base = OTHER; note = Inverted abasic nucleotide
  misc_feature 1..19: note = source = /note="Description of Artificial Sequence: Synthetic oligonucleotide"
  source 1..19: mol_type = other RNA
atgcctttctacagtggcn

SEQ ID NO: 3304 - RNA, 21 nt, synthetic construct
  misc_feature 1..21: note = source = /note="Description of Artificial Sequence: Synthetic oligonucleotide"
  source 1..21: mol_type = other RNA
agccactgtagaaaggcattt

SEQ ID NO: 3305 - RNA, 21 nt, synthetic construct
  modified_base 21: mod_base = OTHER; note = Inverted abasic nucleotide
  misc_feature 1..21: note = source = /note="Description of Artificial Sequence: Synthetic oligonucleotide"
  source 1..21: mol_type = other RNA
tcatgcctttctacagtggcn

SEQ ID NO: 3306 - RNA, 23 nt, synthetic construct
  misc_feature 1..23: note = source = /note="Description of Artificial Sequence: Synthetic oligonucleotide"
  source 1..23: mol_type = other RNA
agccactgtagaaaggcatgatt

SEQ ID NO: 3307 - RNA, 20 nt, synthetic construct
  modified_base 1: mod_base = OTHER; note = Inverted abasic nucleotide
  misc_feature 1..20: note = source = /note="Description of Artificial Sequence: Synthetic oligonucleotide"
  source 1..20: mol_type = other RNA
natgcctttctacagtggct

SEQ ID NO: 3308 - RNA, 21 nt, synthetic construct
  misc_feature 1..21: note = source = /note="Description of Artificial Sequence: Synthetic oligonucleotide"
  source 1..21: mol_type = other RNA
agccactgtagaaaggcattt

SEQ ID NO: 3309 - RNA, 22 nt, synthetic construct
  modified_base 22: mod_base = OTHER; note = Inverted abasic nucleotide
  misc_feature 1..22: note = source = /note="Description of Artificial Sequence: Synthetic oligonucleotide"
  source 1..22: mol_type = other RNA
tcatgcctttctacagtggctn

SEQ ID NO: 3310 - RNA, 23 nt, synthetic construct
  misc_feature 1..23: note = source = /note="Description of Artificial Sequence: Synthetic oligonucleotide"
  source 1..23: mol_type = other RNA
agccactgtagaaaggcatgatt

SEQ ID NO: 3311 - RNA, 21 nt, synthetic construct
  modified_base 21: mod_base = OTHER; note = Inverted abasic nucleotide
  misc_feature 1..21: note = source = /note="Description of Artificial Sequence: Synthetic oligonucleotide"
  source 1..21: mol_type = other RNA
tcatgcctttctacagtggcn

SEQ ID NO: 3312 - RNA, 23 nt, synthetic construct
  misc_feature 1..23: note = source = /note="Description of Artificial Sequence: Synthetic oligonucleotide"
  source 1..23: mol_type = other RNA
agccactgtagaaaggcatgaac

SEQ ID NO: 3313 - RNA, 22 nt, synthetic construct
  modified_base 22: mod_base = OTHER; note = Inverted abasic nucleotide
  misc_feature 1..22: note = source = /note="Description of Artificial Sequence: Synthetic oligonucleotide"
  source 1..22: mol_type = other RNA
tcatgcctttctacagtggctn

SEQ ID NO: 3314 - RNA, 23 nt, synthetic construct
  misc_feature 1..23: note = source = /note="Description of Artificial Sequence: Synthetic oligonucleotide"
  source 1..23: mol_type = other RNA
agccactgtagaaaggcatgaac

SEQ ID NO: 3315 - RNA, 22 nt, synthetic construct
  modified_base 22: mod_base = OTHER; note = Inverted abasic nucleotide
  misc_feature 1..22: note = source = /note="Description of Artificial Sequence: Synthetic oligonucleotide"
  source 1..22: mol_type = other RNA
tcatgcctttctacagtggctn

SEQ ID NO: 3316 - RNA, 23 nt, synthetic construct
  misc_feature 1..23: note = source = /note="Description of Artificial Sequence: Synthetic oligonucleotide"
  source 1..23: mol_type = other RNA
agccactgtagaaaggcatgatt

SEQ ID NO: 3317 - RNA, 21 nt, synthetic construct
  modified_base 21: mod_base = OTHER; note = Inverted abasic nucleotide
  misc_feature 1..21: note = source = /note="Description of Artificial Sequence: Synthetic oligonucleotide"
  source 1..21: mol_type = other RNA
tcatgcctttctacagtggcn

SEQ ID NO: 3318 - RNA, 23 nt, synthetic construct
  misc_feature 1..23: note = source = /note="Description of Artificial Sequence: Synthetic oligonucleotide"
  source 1..23: mol_type = other RNA
agccactgtagaaaggcatgaac

SEQ ID NO: 3319 - RNA, 22 nt, synthetic construct
  modified_base 22: mod_base = OTHER; note = Inverted abasic nucleotide
  misc_feature 1..22: note = source = /note="Description of Artificial Sequence: Synthetic oligonucleotide"
  source 1..22: mol_type = other RNA
tcatgcctttctacagtggctn

SEQ ID NO: 3320 - RNA, 23 nt, synthetic construct
  misc_feature 1..23: note = source = /note="Description of Artificial Sequence: Synthetic oligonucleotide"
  source 1..23: mol_type = other RNA
agccactgtagaaaggcatgaac

SEQ ID NO: 3321 - RNA, 21 nt, synthetic construct
  modified_base 21: mod_base = OTHER; note = Inverted abasic nucleotide
  misc_feature 1..21: note = source = /note="Description of Artificial Sequence: Synthetic oligonucleotide"
  source 1..21: mol_type = other RNA
ctgcttcatgcctttctacan

SEQ ID NO: 3322 - RNA, 23 nt, synthetic construct
  modified_base 6: mod_base = OTHER; note = Inosine
  misc_feature 1..23: note = source = /note="Description of Artificial Sequence: Synthetic oligonucleotide"
  source 1..23: mol_type = other RNA
atgtanaaaggcatgaagcagtt

SEQ ID NO: 3323 - RNA, 21 nt, synthetic construct
  misc_feature 1..21: note = source = /note="Description of Artificial Sequence: Synthetic oligonucleotide"
  source 1..21: mol_type = other RNA
gcggcttcgacggcttctatt

SEQ ID NO: 3324 - RNA, 21 nt, synthetic construct
  misc_feature 1..21: note = source = /note="Description of Artificial Sequence: Synthetic oligonucleotide"
  source 1..21: mol_type = other RNA
tagaagccgtcgaagccgctt

SEQ ID NO: 3325 - RNA, 21 nt, synthetic construct
  misc_feature 1..21: note = source = /note="Description of Artificial Sequence: Synthetic oligonucleotide"
  source 1..21: mol_type = other RNA
gcggcttcgacgggttctatt

SEQ ID NO: 3326 - RNA, 21 nt, synthetic construct
  misc_feature 1..21: note = source = /note="Description of Artificial Sequence: Synthetic oligonucleotide"
  source 1..21: mol_type = other RNA
tagaacccgtcgaagccgctt

SEQ ID NO: 3327 - RNA, 21 nt, synthetic construct
  misc_feature 1..21: note = source = /note="Description of Artificial Sequence: Synthetic oligonucleotide"
  source 1..21: mol_type = other RNA
gcggcttcgacgccttctatt

SEQ ID NO: 3328 - RNA, 21 nt, synthetic construct
  misc_feature 1..21: note = source = /note="Description of Artificial Sequence: Synthetic oligonucleotide"
  source 1..21: mol_type = other RNA
tagaaggcgtcgaagccgctt

SEQ ID NO: 3329 - RNA, 21 nt, synthetic construct
  misc_feature 1..21: note = source = /note="Description of Artificial Sequence: Synthetic oligonucleotide"
  source 1..21: mol_type = other RNA
gcggcttcgaccgcttctatt

SEQ ID NO: 3330 - RNA, 21 nt, synthetic construct
  misc_feature 1..21: note = source = /note="Description of Artificial Sequence: Synthetic oligonucleotide"
  source 1..21: mol_type = other RNA
tagaagcggtcgaagccgctt

SEQ ID NO: 3331 - RNA, 21 nt, synthetic construct
  misc_feature 1..21: note = source = /note="Description of Artificial Sequence: Synthetic oligonucleotide"
  source 1..21: mol_type = other RNA
gcggcttcctgggcttctatt

SEQ ID NO: 3332 - RNA, 22 nt, synthetic construct
  modified_base 1: mod_base = OTHER; note = Inverted abasic nucleotide
  misc_feature 1..22: note = source = /note="Description of Artificial Sequence: Synthetic oligonucleotide"
  source 1..22: mol_type = other RNA
ntagaagcccaggaagccgctt

SEQ ID NO: 3333 - RNA, 22 nt, synthetic construct
  modified_base 1: mod_base = OTHER; note = Inverted abasic nucleotide
  misc_feature 1..22: note = source = /note="Description of Artificial Sequence: Synthetic oligonucleotide"
  source 1..22: mol_type = other RNA
ngcttcatgggattgtacattt

SEQ ID NO: 3334 - RNA, 21 nt, synthetic construct
  misc_feature 1..21: note = source = /note="Description of Artificial Sequence: Synthetic oligonucleotide"
  source 1..21: mol_type = other RNA
atgtacaatcccatgaagctt

SEQ ID NO: 3335 - RNA, 21 nt, synthetic construct
  modified_base 21: mod_base = OTHER; note = Inverted abasic nucleotide
  misc_feature 1..21: note = source = /note="Description of Artificial Sequence: Synthetic oligonucleotide"
  source 1..21: mol_type = other RNA
tcatgcctttgatcactggcn

SEQ ID NO: 3336 - RNA, 23 nt, synthetic construct
  misc_feature 1..23: note = source = /note="Description of Artificial Sequence: Synthetic oligonucleotide"
  source 1..23: mol_type = other RNA
agccagtgatcaaaggcatgatt

SEQ ID NO: 3337 - RNA, 21 nt, synthetic construct
  misc_feature 1..21: note = source = /note="Description of Artificial Sequence: Synthetic oligonucleotide"
  source 1..21: mol_type = other RNA
ctgcttcatgcctttctacac

SEQ ID NO: 3338 - RNA, 23 nt, synthetic construct
  misc_feature 1..23: note = source = /note="Description of Artificial Sequence: Synthetic oligonucleotide"
  source 1..23: mol_type = other RNA
ctgtagaaaggcatgaagcagtt

SEQ ID NO: 3339 - RNA, 22 nt, synthetic construct
  modified_base 1: mod_base = OTHER; note = Inverted abasic nucleotide
  misc_feature 1..22: note = source = /note="Description of Artificial Sequence: Synthetic oligonucleotide"
  source 1..22: mol_type = other RNA
ncttcatgcgaatcaacagttt

SEQ ID NO: 3340 - RNA, 21 nt, synthetic construct
  misc_feature 1..21: note = source = /note="Description of Artificial Sequence: Synthetic oligonucleotide"
  source 1..21: mol_type = other RNA
actgttgattcgcatgaagtt

SEQ ID NO: 3341 - RNA, 21 nt, synthetic construct
  misc_feature 1..21: note = source = /note="Description of Artificial Sequence: Synthetic oligonucleotide"
  source 1..21: mol_type = other RNA
ggccttatccctccttcctta

SEQ ID NO: 3342 - RNA, 23 nt, synthetic construct
  misc_feature 1..23: note = source = /note="Description of Artificial Sequence: Synthetic oligonucleotide"
  source 1..23: mol_type = other RNA
taaggaaggagggataaggccac

SEQ ID NO: 3343 - RNA, 21 nt, synthetic construct
  misc_feature 1..21: note = source = /note="Description of Artificial Sequence: Synthetic oligonucleotide"
  source 1..21: mol_type = other RNA
gtgtctgagttccattccaaa

SEQ ID NO: 3344 - RNA, 23 nt, synthetic construct
  misc_feature 1..23: note = source = /note="Description of Artificial Sequence: Synthetic oligonucleotide"
  source 1..23: mol_type = other RNA
tttggaatggaactcagacacca

SEQ ID NO: 3345 - DNA, 6754 bp, synthetic construct
  misc_feature 1..6754: note = source = /note="Description of Artificial Sequence: Synthetic polynucleotide"
  source 1..6754: mol_type = other DNA
gatctttggccactccctctctgcgcgctcgctcgctcactgaggccgggcgaccaaaggtcgcccgacgcccgggctttgcccgggcggcctcagtgagcgagcgagcgcgcagagagggagtggccaactccatcactaggggttccttcgcgagtatactgagtcattagggactttccaatgggttttgcccagtacataaggtcaataggggtgaatcaacaggaaagtcccattggagccaagtacactgagtcaatagggactttccattgggttttgcccagtacaaaaggtcaatagggggtgagtcaatgggtttttcccattattggcacgtacataaggtcaataggggtgagtcattgggtttttccagccaatttaattaaaacgccatgtactttcccaccattgacgtcaatgggctattgaaactaatgcaacgtgacctttaaacggtactttcccatagctgattaatgggaaagtaccgttctcgagccaatacacgtcaatgggaagtgaaagggcagccaaaacgtaacaccgccccggttttcccctggaaattccatattggcacgcattctattggctgagctgcgttctacgtgggtataagaggcgcgaccagcgtcggtaccgtcgcagtcttcggtctgaccaccgtagaacgcagagctcctcttccgcatcgctgtctgcgagggccagctggtcgacaagcttccaccatggaagacgccaaaaacataaagaaaggcccggcgccattctatccgctggaagatggaaccgctggagagcaactgcataaggctatgaagagatacgccctggttcctggaacaattgcttttacagatgcacatatcgaggtggacatcacttacgctgagtacttcgaaatgtccgttcggttggcagaagctatgaaacgatatgggctgaatacaaatcacagaatcgtcgtatgcagtgaaaactctcttcaattctttatgccggtgttgggcgcgttatttatcggagttgcagttgcgcccgcgaacgacatttataatgaacgtgaattgctcaacagtatgggcatttcgcagcctaccgtggtgttcgtttccaaaaaggggttgcaaaaaattttgaacgtgcaaaaaaagctcccaatcatccaaaaaattattatcatggattctaaaacggattaccagggatttcagtcgatgtacacgttcgtcacatctcatctacctcccggttttaatgaatacgattttgtgccagagtccttcgatagggacaagacaattgcactgatcatgaactcctctggatctactggtctgcctaaaggtgtcgctctgcctcatagaactgcctgcgtgagattctcgcatgccagagatcctatttttggcaatcaaatcattccggatactgcgattttaagtgttgttccattccatcacggttttggaatgtttactacactcggatatttgatatgtggatttcgagtcgtcttaatgtatagatttgaagaagagctgtttctgaggagccttcaggattacaagattcaaagtgcgctgctggtgccaaccctattctccttcttcgccaaaagcactctgattgacaaatacgatttatctaatttacacgaaattgcttctggtggcgctcccctctctaaggaagtcggggaagcggttgccaagaggttccatctgccaggtatcaggcaaggatatgggctcactgagactacatcagctattctgattacacccgagggggatgataaaccgggcgcggtcggtaaagttgttccattttttgaagcgaaggttgtggatctggataccgggaaaacgctgggcgttaatcaaagaggcgaactgtgtgtgagaggtcctatgattatgtccggttatgtaaacaatccggaagcgaccaacgccttgattgacaaggatggatggctacattctggagacatagcttactgggacgaagacgaacacttcttcatcgttgaccgcctgaagtctctgattaagtacaaaggctatcaggtggctcccgctgaattggaatccatcttgctccaacaccccaacatcttcgacgcaggtgtcgcaggtcttcccgacgatgacgccggtgaacttcccgccgccgttgttgttttggagcacggaaagacgatgacggaaaaagagatcgtggattacgtcgccagtcaagtaacaaccgcgaaaaagttgcgcggaggagttgtgtttgtggacgaagtaccgaaaggtcttaccggaaaactcgacgcaagaaaaatcagagagatcctcataaaggccaagaagggcggaaagatcgccgtgtaatctagagctagcccagatcctgtggcagccccttattgttatacgagggatcccagttcgcgggctgcggcttcctgggcttctaccacgtcggggagcagactctgcaggtcctctcagatcttgtgcggaaggtggatgccttggtatgttcctgcttcatgcctttctacagtggccttatccctccttcggaggagtgagtgacaacgtacccttcattgatgccaaagtgagtgacaacgtacccttcattgatgccaaaacaaccgactggtgacatggcttccagatatgcccgacgatgtccgcggccgcaatcaacctctggattacaaaatttgtgaaagattgactggtattcttaactatgttgctccttttacgctatgtggatacgctgctttaatgcctttgtatcatgctattgcttcccgtatggctttcattttctcctccttgtataaatcctggttgctgtctctttatgaggagttgtggcccgttgtcaggcaacgtggcgtggtgtgcactgtgtttgctgacgcaacccccactggttggggcattgccaccacctgtcagctcctttccgggactttcgctttccccctccctattgccacggcggaactcatcgccgcctgccttgcccgctgctggacaggggctcggctgttgggcactgacaattccgtggtgttgtcggggaagctgacgtcctttccatggctgctcgcctgtgttgccacctggattctgcgcgggacgtccttctgctacgtcccttcggccctcaatccagcggaccttccttcccgcggcctgctgccggctctgcggcctcttccgcgtcttcgccttcgccctcagacgagtcggatctccctttgggccgcctccccgcctgtgctgtgatgtatgtcagagagtgttttgcctatgttctcctctaggagttttatagtttctggtcttatgtttagatctttaatccattttgagtttatttttgtgtatggtgttagaaagtggtctagtttcattcttttacaagtggttgaccagatttcccagcaccacttgttaaagagattgtctttaatccattgtatattcttgcctcctttgtcaaagataaggtgtccatatgtgcgtggatttatcctcgactgtgccttctagttgccagccatctgttgtttgcccctcccccgtgccttccttgaccctggaaggtgccactcccactgtcctttcctaataaaatgaggaaattgcatcgcattgtctgagtaggtgtcattctattctggggggtggggtggggcaggacagcaagggggaggattgggaagacaatagcaggcatgatatcaggattctctggaaggtaagctcgactggggatctcgagaggaacccctagtgatggagttggccactccctctctgcgcgctcgctcgctcactgaggccgcccgggcaaagcccgggcgtcgggcgacctttggtcgcccggcctcagtgagcgagcgagcgcgcagagagggagtggccaaagatctcgcgcttggcgtaatcatggtcatagctgtttcctgtgtgaaattgttatccgctcacaattccacacaacatacgagccggaagcataaagtgtaaagcctggggtgcctaatgagtgagctaactcacattaattgcgttgcgctcactgcccgctttccagtcgggaaacctgtcgtgccagctgcattaatgaatcggccaacgcgcggggagaggcggtttgcgtattgggcgctcttccgcttcctcgctcactgactcgctgcgctcggtcgttcggctgcggcgagcggtatcagctcactcaaaggcggtaatacggttatccacagaatcaggggataacgcaggaaagaacatgtgagcaaaaggccagcaaaaggccaggaaccgtaaaaaggccgcgttgctggcgtttttccataggctccgcccccctgacgagcatcacaaaaatcgacgctcaagtcagaggtggcgaaacccgacaggactataaagataccaggcgtttccccctggaagctccctcgtgcgctctcctgttccgaccctgccgcttaccggatacctgtccgcctttctcccttcgggaagcgtggcgctttctcatagctcacgctgtaggtatctcagttcggtgtaggtcgttcgctccaagctgggctgtgtgcacgaaccccccgttcagcccgaccgctgcgccttatccggtaactatcgtcttgagtccaacccggtaagacacgacttatcgccactggcagcagccactggtaacaggattagcagagcgaggtatgtaggcggtgctacagagttcttgaagtggtggcctaactacggctacactagaaggacagtatttggtatctgcgctctgctgaagccagttaccttcggaaaaagagttggtagctcttgatccggcaaacaaaccaccgctggtagcggtggtttttttgtttgcaagcagcagattacgcgcagaaaaaaaggatctcaagaagatcctttgatcttttctacggggtctgacgctcagtggaacgaaaactcacgttaagggattttggtcatgagattatcaaaaaggatcttcacctagatccttttaaattaaaaatgaagttttaaatcaatctaaagtatatatgagtaaacttggtctgacagttaccaatgcttaatcagtgaggcacctatctcagcgatctgtctatttcgttcatccatagttgcctgactccccgtcgtgtagataactacgatacgggagggcttaccatctggccccagtgctgcaatgataccgcgagacccacgctcaccggctccagatttatcagcaataaaccagccagccggaagggccgagcgcagaagtggtcctgcaactttatccgcctccatccagtctattaattgttgccgggaagctagagtaagtagttcgccagttaatagtttgcgcaacgttgttgccattgctacaggcatcgtggtgtcacgctcgtcgtttggtatggcttcattcagctccggttcccaacgatcaaggcgagttacatgatcccccatgttgtgcaaaaaagcggttagctccttcggtcctccgatcgttgtcagaagtaagttggccgcagtgttatcactcatggttatggcagcactgcataattctcttactgtcatgccatccgtaagatgcttttctgtgactggtgagtactcaaccaagtcattctgagaatagtgtatgcggcgaccgagttgctcttgcccggcgtcaatacgggataataccgcgccacatagcagaactttaaaagtgctcatcattggaaaacgttcttcggggcgaaaactctcaaggatcttaccgctgttgagatccagttcgatgtaacccactcgtgcacccaactgatcttcagcatcttttactttcaccagcgtttctgggtgagcaaaaacaggaaggcaaaatgccgcaaaaaagggaataagggcgacacggaaatgttgaatactcatactcttcctttttcaatattattgaagcatttatcagggttattgtctcatgagcggatacatatttgaatgtatttagaaaaataaacaaataggggttccgcgcacatttccccgaaaagtgccacctaaattgtaagcgttaatattttgttaaaattcgcgttaaatttttgttaaatcagctcattttttaaccaataggccgaaatcggcaaaatcccttataaatcaaaagaatagaccgagatagggttgagtgttgttccagtttggaacaagagtccactattaaagaacgtggactccaacgtcaaagggcgaaaaaccgtctatcagggcgatggcccactacgtgaaccatcaccctaatcaagttttttggggtcgaggtgccgtaaagcactaaatcggaaccctaaagggagcccccgatttagagcttgacggggaaagccggcgaacgtggcgagaaaggaagggaagaaagcgaaaggagcgggcgctagggcgctggcaagtgtagcggtcacgctgcgcgtaaccaccacacccgccgcgcttaatgcgccgctacagggcgcgtcccattcgccattcaggctgcgcaactgttgggaagggcgatcggtgcgggcctcttcgctattacgccagctggcgaaagggggatgtgctgcaaggcgattaagttgggtaacgccagggttttcccagtcacgacgttgtaaaacgacggccagtgagcgcga

SEQ ID NO: 3346 - DNA, 6754 bp, synthetic construct
  misc_feature 1..6754: note = source = /note="Description of Artificial Sequence: Synthetic polynucleotide"
  source 1..6754: mol_type = other DNA
gatctttggccactccctctctgcgcgctcgctcgctcactgaggccgggcgaccaaaggtcgcccgacgcccgggctttgcccgggcggcctcagtgagcgagcgagcgcgcagagagggagtggccaactccatcactaggggttccttcgcgagtatactgagtcattagggactttccaatgggttttgcccagtacataaggtcaataggggtgaatcaacaggaaagtcccattggagccaagtacactgagtcaatagggactttccattgggttttgcccagtacaaaaggtcaatagggggtgagtcaatgggtttttcccattattggcacgtacataaggtcaataggggtgagtcattgggtttttccagccaatttaattaaaacgccatgtactttcccaccattgacgtcaatgggctattgaaactaatgcaacgtgacctttaaacggtactttcccatagctgattaatgggaaagtaccgttctcgagccaatacacgtcaatgggaagtgaaagggcagccaaaacgtaacaccgccccggttttcccctggaaattccatattggcacgcattctattggctgagctgcgttctacgtgggtataagaggcgcgaccagcgtcggtaccgtcgcagtcttcggtctgaccaccgtagaacgcagagctcctcttccgcatcgctgtctgcgagggccagctggtcgacaagcttccaccatggaagacgccaaaaacataaagaaaggcccggcgccattctatccgctggaagatggaaccgctggagagcaactgcataaggctatgaagagatacgccctggttcctggaacaattgcttttacagatgcacatatcgaggtggacatcacttacgctgagtacttcgaaatgtccgttcggttggcagaagctatgaaacgatatgggctgaatacaaatcacagaatcgtcgtatgcagtgaaaactctcttcaattctttatgccggtgttgggcgcgttatttatcggagttgcagttgcgcccgcgaacgacatttataatgaacgtgaattgctcaacagtatgggcatttcgcagcctaccgtggtgttcgtttccaaaaaggggttgcaaaaaattttgaacgtgcaaaaaaagctcccaatcatccaaaaaattattatcatggattctaaaacggattaccagggatttcagtcgatgtacacgttcgtcacatctcatctacctcccggttttaatgaatacgattttgtgccagagtccttcgatagggacaagacaattgcactgatcatgaactcctctggatctactggtctgcctaaaggtgtcgctctgcctcatagaactgcctgcgtgagattctcgcatgccagagatcctatttttggcaatcaaatcattccggatactgcgattttaagtgttgttccattccatcacggttttggaatgtttactacactcggatatttgatatgtggatttcgagtcgtcttaatgtatagatttgaagaagagctgtttctgaggagccttcaggattacaagattcaaagtgcgctgctggtgccaaccctattctccttcttcgccaaaagcactctgattgacaaatacgatttatctaatttacacgaaattgcttctggtggcgctcccctctctaaggaagtcggggaagcggttgccaagaggttccatctgccaggtatcaggcaaggatatgggctcactgagactacatcagctattctgattacacccgagggggatgataaaccgggcgcggtcggtaaagttgttccattttttgaagcgaaggttgtggatctggataccgggaaaacgctgggcgttaatcaaagaggcgaactgtgtgtgagaggtcctatgattatgtccggttatgtaaacaatccggaagcgaccaacgccttgattgacaaggatggatggctacattctggagacatagcttactgggacgaagacgaacacttcttcatcgttgaccgcctgaagtctctgattaagtacaaaggctatcaggtggctcccgctgaattggaatccatcttgctccaacaccccaacatcttcgacgcaggtgtcgcaggtcttcccgacgatgacgccggtgaacttcccgccgccgttgttgttttggagcacggaaagacgatgacggaaaaagagatcgtggattacgtcgccagtcaagtaacaaccgcgaaaaagttgcgcggaggagttgtgtttgtggacgaagtaccgaaaggtcttaccggaaaactcgacgcaagaaaaatcagagagatcctcataaaggccaagaagggcggaaagatcgccgtgtaatctagagctagcccagatcctgtggcagccccttattgttatacgagggatcccagttcgcgggctgcggcttcctgggcttctaccacgtcggggagcagactctgcaggtcctctcagatcttgtgcggaaggtggatgccttggtatgttcctgcttcatccccttctacagtggccttatccctccttcggaggagtgagtgacaacgtacccttcattgatgccaaagtgagtgacaacgtacccttcattgatgccaaaacaaccgactggtgacatggcttccagatatgcccgacgatgtccgcggccgcaatcaacctctggattacaaaatttgtgaaagattgactggtattcttaactatgttgctccttttacgctatgtggatacgctgctttaatgcctttgtatcatgctattgcttcccgtatggctttcattttctcctccttgtataaatcctggttgctgtctctttatgaggagttgtggcccgttgtcaggcaacgtggcgtggtgtgcactgtgtttgctgacgcaacccccactggttggggcattgccaccacctgtcagctcctttccgggactttcgctttccccctccctattgccacggcggaactcatcgccgcctgccttgcccgctgctggacaggggctcggctgttgggcactgacaattccgtggtgttgtcggggaagctgacgtcctttccatggctgctcgcctgtgttgccacctggattctgcgcgggacgtccttctgctacgtcccttcggccctcaatccagcggaccttccttcccgcggcctgctgccggctctgcggcctcttccgcgtcttcgccttcgccctcagacgagtcggatctccctttgggccgcctccccgcctgtgctgtgatgtatgtcagagagtgttttgcctatgttctcctctaggagttttatagtttctggtcttatgtttagatctttaatccattttgagtttatttttgtgtatggtgttagaaagtggtctagtttcattcttttacaagtggttgaccagatttcccagcaccacttgttaaagagattgtctttaatccattgtatattcttgcctcctttgtcaaagataaggtgtccatatgtgcgtggatttatcctcgactgtgccttctagttgccagccatctgttgtttgcccctcccccgtgccttccttgaccctggaaggtgccactcccactgtcctttcctaataaaatgaggaaattgcatcgcattgtctgagtaggtgtcattctattctggggggtggggtggggcaggacagcaagggggaggattgggaagacaatagcaggcatgatatcaggattctctggaaggtaagctcgactggggatctcgagaggaacccctagtgatggagttggccactccctctctgcgcgctcgctcgctcactgaggccgcccgggcaaagcccgggcgtcgggcgacctttggtcgcccggcctcagtgagcgagcgagcgcgcagagagggagtggccaaagatctcgcgcttggcgtaatcatggtcatagctgtttcctgtgtgaaattgttatccgctcacaattccacacaacatacgagccggaagcataaagtgtaaagcctggggtgcctaatgagtgagctaactcacattaattgcgttgcgctcactgcccgctttccagtcgggaaacctgtcgtgccagctgcattaatgaatcggccaacgcgcggggagaggcggtttgcgtattgggcgctcttccgcttcctcgctcactgactcgctgcgctcggtcgttcggctgcggcgagcggtatcagctcactcaaaggcggtaatacggttatccacagaatcaggggataacgcaggaaagaacatgtgagcaaaaggccagcaaaaggccaggaaccgtaaaaaggccgcgttgctggcgtttttccataggctccgcccccctgacgagcatcacaaaaatcgacgctcaagtcagaggtggcgaaacccgacaggactataaagataccaggcgtttccccctggaagctccctcgtgcgctctcctgttccgaccctgccgcttaccggatacctgtccgcctttctcccttcgggaagcgtggcgctttctcatagctcacgctgtaggtatctcagttcggtgtaggtcgttcgctccaagctgggctgtgtgcacgaaccccccgttcagcccgaccgctgcgccttatccggtaactatcgtcttgagtccaacccggtaagacacgacttatcgccactggcagcagccactggtaacaggattagcagagcgaggtatgtaggcggtgctacagagttcttgaagtggtggcctaactacggctacactagaaggacagtatttggtatctgcgctctgctgaagccagttaccttcggaaaaagagttggtagctcttgatccggcaaacaaaccaccgctggtagcggtggtttttttgtttgcaagcagcagattacgcgcagaaaaaaaggatctcaagaagatcctttgatcttttctacggggtctgacgctcagtggaacgaaaactcacgttaagggattttggtcatgagattatcaaaaaggatcttcacctagatccttttaaattaaaaatgaagttttaaatcaatctaaagtatatatgagtaaacttggtctgacagttaccaatgcttaatcagtgaggcacctatctcagcgatctgtctatttcgttcatccatagttgcctgactccccgtcgtgtagataactacgatacgggagggcttaccatctggccccagtgctgcaatgataccgcgagacccacgctcaccggctccagatttatcagcaataaaccagccagccggaagggccgagcgcagaagtggtcctgcaactttatccgcctccatccagtctattaattgttgccgggaagctagagtaagtagttcgccagttaatagtttgcgcaacgttgttgccattgctacaggcatcgtggtgtcacgctcgtcgtttggtatggcttcattcagctccggttcccaacgatcaaggcgagttacatgatcccccatgttgtgcaaaaaagcggttagctccttcggtcctccgatcgttgtcagaagtaagttggccgcagtgttatcactcatggttatggcagcactgcataattctcttactgtcatgccatccgtaagatgcttttctgtgactggtgagtactcaaccaagtcattctgagaatagtgtatgcggcgaccgagttgctcttgcccggcgtcaatacgggataataccgcgccacatagcagaactttaaaagtgctcatcattggaaaacgttcttcggggcgaaaactctcaaggatcttaccgctgttgagatccagttcgatgtaacccactcgtgcacccaactgatcttcagcatcttttactttcaccagcgtttctgggtgagcaaaaacaggaaggcaaaatgccgcaaaaaagggaataagggcgacacggaaatgttgaatactcatactcttcctttttcaatattattgaagcatttatcagggttattgtctcatgagcggatacatatttgaatgtatttagaaaaataaacaaataggggttccgcgcacatttccccgaaaagtgccacctaaattgtaagcgttaatattttgttaaaattcgcgttaaatttttgttaaatcagctcattttttaaccaataggccgaaatcggcaaaatcccttataaatcaaaagaatagaccgagatagggttgagtgttgttccagtttggaacaagagtccactattaaagaacgtggactccaacgtcaaagggcgaaaaaccgtctatcagggcgatggcccactacgtgaaccatcaccctaatcaagttttttggggtcgaggtgccgtaaagcactaaatcggaaccctaaagggagcccccgatttagagcttgacggggaaagccggcgaacgtggcgagaaaggaagggaagaaagcgaaaggagcgggcgctagggcgctggcaagtgtagcggtcacgctgcgcgtaaccaccacacccgccgcgcttaatgcgccgctacagggcgcgtcccattcgccattcaggctgcgcaactgttgggaagggcgatcggtgcgggcctcttcgctattacgccagctggcgaaagggggatgtgctgcaaggcgattaagttgggtaacgccagggttttcccagtcacgacgttgtaaaacgacggccagtgagcgcga

1. An RNAi construct comprising a sense strand and an antisense strand, wherein the antisense strand comprises a region having at least 15 contiguous nucleotides differing by no more than 3 nucleotides from an antisense sequence listed in Table 1 or 2, and wherein the RNAi construct inhibits the expression of Patatin-Like Phospholipase Domain Containing 3 (PNPLA3).

2. The RNAi construct of claim 1, wherein the antisense strand comprises a region that is complementary to a PNPLA3 mRNA sequence.

3. The RNAi construct of claim 1, wherein the sense strand comprises a region having at least 15 contiguous nucleotides differing by no more than 3 nucleotides from an antisense sequence listed in Table 1 or 2.

4. The RNAi construct of claim 1, wherein the construct preferentially inhibits a PNPLA3-rs738409 minor allele.

5. The RNAi construct of claim 4, wherein the construct has at least 10% greater inhibition of a PNPLA3-rs738409 minor allele as compared to the major allele.

6. The RNAi construct of claim 1, wherein the construct preferentially inhibits a PNPLA3-rs738408 minor allele.

7. The RNAi construct of claim 6, wherein the construct has at least 10% greater inhibition of a PNPLA3-rs738409-rs738408 double minor allele as compared to the major allele.

8. The RNAi construct of claim 1, wherein the sense strand comprises a sequence that is sufficiently complementary to the sequence of the antisense strand to form a duplex region of about 15 to about 30 base pairs in length.

9. The RNAi construct of claim 8, wherein the duplex region is about 17 to about 24 base pairs in length.

10. (canceled)

11. The RNAi construct of claim 10, wherein the duplex region is 19 base pairs in length.

12. The RNAi construct of claim 10, wherein the duplex region is 20 base pairs in length.

13. The RNAi construct of claim 10, wherein the duplex region is 21 base pairs in length.

14. (canceled)

15. The RNAi construct of claim 8, wherein the sense strand and the antisense strand are each about 19 to about 27 nucleotides in length.

16. The RNAi construct of claim 8, wherein the sense strand and the antisense strand are each about 21 to about 25 nucleotides in length.

17. (canceled)

18. The RNAi construct of claim 1, wherein the RNAi construct comprises at least one blunt end.

19. The RNAi construct of claim 1, wherein the RNAi construct comprises at least one nucleotide overhang of 1 to 4 unpaired nucleotides.

20. The RNAi construct of claim 19, wherein the nucleotide overhang has 2 unpaired nucleotides.

21. The RNAi construct of claim 19, wherein the RNAi construct comprises a nucleotide overhang at the 3′ end of the sense strand, the 3′ end of the antisense strand, or the 3′ end of both the sense strand and the antisense strand.

22. The RNAi construct of claim 19, wherein the nucleotide overhang comprises a 5′-UU-3′ dinucleotide or a 5′-dTdT-3′ dinucleotide.

23. The RNAi construct of claim 1, wherein the RNAi construct comprises at least one modified nucleotide.

24. The RNAi construct of claim 23, wherein the modified nucleotide is a 2′-modified nucleotide.

25. The RNAi construct of claim 23, wherein the modified nucleotide is a 2′-fluoro modified nucleotide, a 2′-O-methyl modified nucleotide, a 2′-O-methoxyethyl modified nucleotide, a 2′-O-allyl modified nucleotide, a bicyclic nucleic acid (BNA), a glycol nucleic acid, an inverted base or combinations thereof.

26. The RNAi construct of claim 25, wherein the modified nucleotide is a 2′-O-methyl modified nucleotide, a 2′-O-methoxyethyl modified nucleotide, a 2′-fluoro modified nucleotide, or combinations thereof.

27. The RNAi construct of claim 23, wherein all of the nucleotides in the sense and antisense strands are modified nucleotides.

28. The RNAi construct of claim 27, wherein the modified nucleotides are 2′-O-methyl modified nucleotides, 2′-fluoro modified nucleotides, or combinations thereof.

29. The RNAi construct of claim 1, wherein the RNAi construct comprises at least one phosphorothioate internucleotide linkage.

30. The RNAi construct of claim 29, wherein the RNAi construct comprises two consecutive phosphorothioate internucleotide linkages at the 3′ end of the antisense strand.

31. The RNAi construct of claim 29, wherein the RNAi construct comprises two consecutive phosphorothioate internucleotide linkages at both the 3′ and 5′ ends of the antisense strand and two consecutive phosphorothioate internucleotide linkages at the 5′ end of the sense strand.

32. The RNAi construct of claim 1, wherein the antisense strand comprises a sequence selected from the antisense sequences listed in Table 1 or Table 2.

33. The RNAi construct of claim 32, wherein the sense strand comprises a sequence selected from the sense sequences listed in Table 1 or Table 2.

34. The RNAi construct of claim 1, wherein the RNAi construct is any one of the duplex compounds listed in any one of Tables 1 to 2.

35. The RNAi construct of claim 1, wherein the RNAi construct reduces the expression level of PNPLA3 in liver cells following incubation with the RNAi construct as compared to the PNPLA3 expression level in liver cells that have been incubated with a control RNAi construct.

36.-40. (canceled)

41. A pharmaceutical composition comprising the RNAi construct of claim 1 and a pharmaceutically acceptable carrier, excipient, or diluent.

42. A method for reducing the expression of PNPLA3 in a patient in need thereof comprising administering to the patient the RNAi construct of claim 1.

43. The method of claim 42, wherein the expression level of PNPLA3 in hepatocytes is reduced in the patient following administration of the RNAi construct as compared to the PNPLA3 expression level in a patient not receiving the RNAi construct.
